(19) United States
(12) Patent Application Publication
(10) Pub. No.: US 2006/0046249 A1
(43) Pub. Date: Mar. 2, 2006

(54) Identification of polynucleotides and polypetide for predicting activity of compounds that interact with protein tyrosine kinase and or protein tyrosine kinase pathways

(76) Inventors: Fei Huang, Princeton, NJ (US); Craig R Fairchild, Yardley, PA (US); Francis Y Lee, Yardley, PA (US); Peter Shaw, Yardley, PA (US)

Correspondence Address: STEPHEN B. DAVIS;BRISTOL-MYERS SQUIBB COMPANY, PATENT DEPARTMENT, P O BOX 4000, PRINCETON, NJ, 08543-4000, US

(21) Appl. No.: 10/501,035

(22) PCT Filed: Jan. 17, 2003
(86) PCT No.: PCT/US03/01981

§ 371 Date: May 2, 2005

Related U.S. Application Data
(60) Provisional application No. 60/350,061, filed on Jan. 18, 2002.

(51) Int. Cl. C12Q 1/68; C07H 21/04

(52) U.S. Cl. 435/6; 536/24.1

(57) ABSTRACT

The present invention describes polynucleotides and polypeptides that have been discovered to correlate to the relative intrinsic sensitivity or resistance of cells, e.g., colon cell lines, to treatment with compounds that interact with and inhibit src tyrosine kinases. These polynucleotides and polypeptides have been shown, through a weighted voting cross validation program, to have utility in predicting the intrinsic resistance and sensitivity of colon cell lines to these compounds. Such polynucleotides and polypeptides whose expression levels correlate highly with drug sensitivity or resistance comprise predictor or marker sets of polynucleotides and polypeptides that are useful in methods of predicting drug response, and as prognostic or diagnostic indicators in disease management, particularly in those disease areas in which signaling through src tyrosine kinase of the src tyrosine kinase pathway is involved with the disease process.

[0001] This application claims benefit to provisional application U.S. Ser. No. 60/350,061 filed Jan. 18, 2002. The entire teachings of the referenced application are incorporated herein by reference.

### FIELD OF THE INVENTION

[0002] The present invention relates generally to the field of pharmacogenomics, and more specifically to new and alternative methods and procedures to determine drug sensitivity in patients to allow the development of individualized genetic profiles which aid in treating diseases and disorders based on patient response at a molecular level.

### BACKGROUND OF THE INVENTION

[0003] The major goal of pharmacogenomics research is to identify genetic markers that accurately predict a given patient's response to drugs in the clinic; such individualized genetic assessment would greatly facilitate personalized treatment. An approach of this nature is particularly needed in cancer treatment and therapy, where commonly used agents are ineffective in many patients, and side effects are frequent.

[0004] The classification of patient samples is a crucial aspect of cancer diagnosis and treatment. The association of a patient's response to drug treatment with molecular and genetic markers can open up new opportunities for drug development in non-responding patients, or distinguish a drug's indication among other treatment choices because of higher confidence in the efficacy. Further, the pre-selection of patients who are likely to respond well to a medicine, drug, or combination therapy may reduce the number of patients needed in a clinical study or accelerate the time needed to complete a clinical development program (M. Cockett et al., 2000, Current Opinion in Biotechnology, 11:602-609).

[0005] The ability to predict drug sensitivity in patients is particularly challenging because drug responses reflect not only properties intrinsic to the target cells, but also a host's metabolic properties. Efforts by those in the art to use genetic information to predict drug sensitivity have primarily focused on individual polynucleotides and polypeptides that have broad effects, such as the multidrug resistant polynucleotides and polypeptides, mdr1 and mrp1 (P. Sonneveld, 2000, J. Intern. Med., 247:521-534). Microarray technologies have also made it more straightforward to monitor simultaneously the expression pattern of thousands of polynucleotides and polypeptides, to analyze multiple markers and to categorize cancers into subgroups (J. Khan et al., 1998, Cancer Res., 58:5009-5013; A. A. Alizadeh et al., 2000, Nature, 403:503-511; M. Bittner et al., 2000, Nature, 406:536-540; J. Khan et al., 2001, Nature Medicine, 7(6):673-679; and T. R. Golub et al., 1999, Science, 286:531-537).

[0006] Such technologies and molecular tools have made it possible to monitor the expression level of a large number of transcripts within a cell at any one time (see, e.g., Schena et al., 1995, Quantitative monitoring of gene expression patterns with a complementary DNA micro-array, Science, 270:467470; Lockhart et al., 1996, Expression monitoring by hybridization to high-density oligonucleotide arrays, Nature Biotechnology, 14:1675-1680; Blanchard et al., 1996, Sequence to array: Probing the genome's secrets, Nature Biotechnology, 14:1649; U.S. Pat. No. 5,569,588, issued Oct. 29, 1996 to Ashby et al.) In organisms, including humans, for which the complete genome is known, it is possible to analyze the transcripts of all polynucleotides and polypeptides within the cell.

[0007] How differential gene expression is associated with health and disease is a basis of functional genomics, which is defined as the study of all of the polynucleotides and polypeptides expressed by a specific cell or a group of cells and the changes in their expression pattern during development, disease, or environmental exposure. Hybridization arrays, used to study gene expression, allow gene expression analysis on a genomic scale by permitting the examination of changes in expression of literally thousands of polynucleotides and polypeptides at one time. In general, for hybridization arrays, gene-specific sequences (probes) are immobilized on a solid state matrix. These sequences are then queried with labeled copies of nucleic acids from biological samples (targets). The underlying theory is that the greater the expression of a gene, the greater the amount of labeled target and thus, the greater output of signal. (W. M. Freeman et al., 2000, BioTechniques), 29:1042-1055).

[0008] Recent studies have demonstrated that gene expression information generated by microarray analysis of human tumors can predict clinical outcome (L. J. van't Veer et al., 2002, Nature, 415:530-536; M. West et al., 2001, Proc. Natl. Acad. Sci. USA, 98:11462-11467; T. Sorlie et al., 2001, Proc. Natl. Acad. Sci. USA, 98:10869-10874; M. Shipp et al., 2002, Nature Medicine, 8(1):68-74). These findings bring hope that cancer treatment will be vastly improved by better predicting the response of individual tumors to therapy.

[0009] Needed in the art are new and alternative methods and procedures to determine drug sensitivity in patients to allow the development of individualized genetic profiles which aid in treating diseases and disorders based on patient response at a molecular level. By using cultured cells as a model of in vivo effects, the present invention advantageously focuses on cell-intrinsic properties that are exposed in cell culture and involves identified polynucleotides and polypeptides that correlate with drug sensitivity. The presently described discovery and identification of polynucleotides and polypeptides/marker polynucleotides and polypeptides (predictor polynucleotides, predictor polypeptides, predicter polynucleotide subsets, and predictor polypeptide subsets) in cell lines assayed in vitro can be used to correlate with drug responses in vivo, and thus can be extended to clinical situations in which the same polynucleotides and polypeptides are used to predict responses to drugs and/or chemotherapeutic agents by patients.

### SUMMARY OF THE INVENTION

[0010] The present invention describes the identification of marker polynucleotides and polypeptides whose expression levels are highly correlated with drug sensitivity in colon cell lines that are either sensitive or resistant to protein tyrosine kinase inhibitor compounds. More particularly, the protein tyrosine kinases that are inhibited in accordance with the present invention include members of the Src family of tyrosine kinases, for example, Src, Fgr, Fyn, Yes, Bik, Hck, Lck and Lyn, as well as other protein tyrosine kinases, including, Bcr-abl, Jak, PDGFR, c-kit and Ephr. For a review of these and other protein tyrosine kinases, see, for example, P. Blume-Jensen and T. Hunter, 2001, “Oncogene Kinase Signaling”, Nature, 411:355-365. Some of these polynucleotides and polypeptides are also modulated by the tyrosine kinase inhibitor compounds, in particular, src tyrosine kinase inhibitor compounds, which indicates their involvement in the protein tyrosine kinase signaling pathway. These polynucleotides and polypeptides or “markers” show utility in predicting a host's response to a drug and/or drug treatment.

[0011] It is an object of this invention to provide a cell culture model to identify polynucleotides and polypeptides whose expression levels correlate with drug sensitivity of cells associated with a disease state, or a host having a disease. In accordance with the present invention, oligonucleotide microarrays were utilized to measure the expression levels of a large number of polynucleotides and polypeptides in a panel of untreated cell lines, particularly colon cell lines, for which drug sensitivity to four src kinase inhibitor compounds was determined. The determination of the gene expression profiles in the previously untreated cells allowed a prediction of chemosensitivity and the identification of marker polynucleotides and polypeptides whose expression levels highly correlate with sensitivity to drugs or compounds that modulate, preferably inhibit, src kinase or src family kinases or the pathway in which src or src family tyrosine kinases are involved. The marker or predictor polynucleotides and polypeptides are thus useful for predicting a patient's response to drugs or drug treatments that directly or indirectly affect src or src family tyrosine kinases activity.

[0012] It is another object of the present invention to provide a method of determining or predicting if an individual requiring drug or chemotherapeutic treatment or therapy for a disease state, for example, colon disease, or a cancer or tumor of a particular type, preferably, a colon cancer or tumor, will successfully respond or will not respond to the drug or chemotherapeutic treatment or therapy, preferably a treatment or therapy involving a src or src family tyrosine kinases modulating agent, e.g., an inhibitor of src kinase activity, prior to subjecting the individual to such treatment or chemotherapy. Preferably, the treatment or therapy involves a protein tyrosine kinase modulating agent, e.g., an inhibitor of the protein tyrosine kinase activity. The protein tyrosine kinases whose activities can be inhibited by inhibitor compounds according to this invention include, for example, members of the Src family of tyrosine kinases, for example, Src, Fgr, Fyn, Yes, Blk, Hck, Lck and Lyn, as well as other protein tyrosine kinases, including, Bcr-abl, Jak, PDGFR, c-kit and Ephr. In accordance with the present invention, cells from a patient tissue sample, e.g., a tumor or cancer biopsy, preferably a colon cancer or tumor sample, or sloughed colonocytes, are assayed to determine their gene expression pattern prior to treatment with a src or src family tyrosine kinases modulating compound or drug, preferably a src kinase inhibitor. The resulting gene expression profile of the test cells before exposure to the compound or drug is compared with the gene expression pattern of the predictor set of polynucleotides and polypeptides that have been described and shown herein (Tables 3-6) in the control panel of the untreated cells that are either resistant or sensitive to the drug or compound, i.e., FIGS. 1-3.

[0013] In addition, in such a method, the gene expression pattern of subsets of predictor polynucleotides and polypeptides, comprising at least about 5, at least about 10, at least about 15, at least about 20, at least about 25, at least about 30, at least about 40, at least about 45 at least about 50, or more, polynucleotides and polypeptides may be used. In this context, the term “about” may be construed to mean 1, 2, 3, 4, or 5 more or less polynucleotides or polypeptides within each predicter subset. Preferably, in such a method, the gene expression pattern of subsets of predictor polynucleotides and polypeptides, comprising sets of 25, 15 and 10 polynucleotides and polypeptides as set forth in Tables 10 thru 12, respectively, can also be used. These polynucleotides and polypeptides are derived from the control panel of the untreated cells that have been determined to be either resistant or sensitive to the drug or compound as shown herein.

[0014] Success or failure of treatment with a drug can be determined based on the gene expression pattern of the test cells from the test tissue, e.g., tumor or cancer biopsy, as being relatively the same as or different from the gene expression pattern of the predictor set of polynucleotides and polypeptides in the resistant or sensitive control panel of cells for which drug sensitivity to the src kinase inhibitor compounds has been determined. Thus, if the test cells show a gene expression profile which corresponds to that of the predictor set of polynucleotides and polypeptides in the control panel of cells which are sensitive to the drug or compound, it is highly likely or predicted that the individual's cancer or tumor will respond favorably to treatment with the drug or compound. By contrast, if the test cells show a gene expression pattern corresponding to that of the predictor set of polynucleotides and polypeptides of the control panel of cells which are resistant to the drug or compound, it is highly likely or predicted that the individual's cancer or tumor will not respond to treatment with the drug or compound.

[0015] It is an aspect of this invention to provide screening assays for determining if a cancer patient will be susceptible or resistant to treatment with a drug or compound, particularly, a drug or compound directly or indirectly involved in a protein tyrosine kinase activity or a protein tyrosine kinase pathway. Such protein tyrosine kinases include, without limitation, members of the Src family of tyrosine kinases, for example, Src, Fgr, Fyn, Yes, Blk, Hck, Lck and Lyn, as well as other protein tyrosine kinases, including, Bcr-abl, Jak, PDGFR, c-kit and Ephr.

[0016] It is a further object of the present invention to provide screening assays for determining if a patient's cancer tumor will be susceptible or resistant to treatment with a drug or compound, particularly, a drug or compound directly or indirectly involved in src or src family tyrosine kinases activity or the src or src family tyrosine kinases pathway.

[0017] It is another object of the present invention to provide a method of monitoring the treatment of a patient having a disease treatable by a compound or agent that modulates a src tyrosine kinase by comparing the resistance or sensitivity gene expression profile of cells from a patient tissue sample, e.g., a tumor or cancer biopsy, preferably a colon cancer or tumor sample, prior to treatment with a drug or compound that inhibits src or src family tyrosine kinases activity and again following treatment with the drug or compound. The isolated cells from the patient are assayed to determine their gene expression pattern before and after exposure to a compound or drug, preferably a src kinase inhibitor, to determine if a change of the gene expression profile has occurred so as to warrant treatment with another drug or agent, or to discontinue current treatment. The resulting gene expression profile of the cells tested before and after treatment is compared with the gene expression pattern of the predictor set of polynucleotides and polypeptides that have been described and shown herein to be highly expressed in cells that are either resistant or sensitive to the drug or compound.

[0018] Such a monitoring process can indicate success or failure of a patient's treatment with a drug or compound based on the gene expression pattern of the cells isolated from the patient's sample, e.g., a tumor or cancer biopsy, as being relatively the same as or different from the gene expression pattern of the predictor gene set of the resistant or sensitive control panel of cells that have been exposed to the drug or compound and assessed for their gene expression profile following-exposure. Thus, if, after treatment with a drug or compound, the test cells show a change in their gene expression profile from that seen prior to treatment to one which corresponds to that of the control panel of cells that are resistant to the drug or compound, it can serve as an indicator that the current treatment should be modified, changed, or even discontinued. Also, should a patient's response become one that is sensitive to treatment by a src kinase inhibitor compound, based on correlation of the expression profile of the predictor polynucleotides and polypeptides, the patient's treatment prognosis can be qualified as favorable and treatment can continue. Such monitoring processes can be repeated as necessary or desired. The monitoring of a patient's response to a given drug treatment can also involve testing the patient's cells in the assay as described only after treatment, rather than before and after treatment, with drug or active compound.

[0019] It is a further object of the present invention to provide predictor polynucleotides and polypeptides and predictor sets of polynucleotides and polypeptides as tools that have both diagnostic and prognostic value in disease areas in which signaling through protein tyrosine kinase or a protein tyrosine kinase pathway is of importance, e.g., in cancers and tumors, in immunological disorders, conditions or dysfunctions, or in disease states in which cell signaling and/or proliferation controls are abnormal or aberrant. Such protein tyrosine kinases whose direct or indirect modulation can be associated with a disease state or condition, include members of the Src family of tyrosine kinases, for example, Src, Fgr, Fyn, Yes, Blk, Hck, Lck and Lyn, as well as other protein tyrosine kinases, including, Bcr-abl, Jak, PDGFR, c-kit and Ephr. In accordance with this invention, the use of predictor polynucleotides and polypeptides, or a predictor gene set, is to forecast or foretell an outcome prior to having any knowledge about a biological system, or a cellular response. Also according to this invention, the predictor polynucleotides and polypeptides or predictor gene set is useful in predicting the phenotype that is used to classify a biological system or response. For example, the classification of a cell line as “resistant” or “sensitive” is based on the log₁₀(IC₅₀) value of each cell line to one or more compounds (e.g., a src kinase inhibitor compound), relative to the mean log₁₀(IC₅₀) value of a cell line panel (e.g., a thirty-one colon cell line panel, as described herein) that has been previously exposed to the compounds and statistically assessed as to the expression level of polynucleotides and polypeptides correlating to resistance or sensitivity following exposure to the one or more compounds.

[0020] It is yet another object of the present invention to provide polynucleotides and polypeptides, such as those listed in Tables 3-5, or the common polynucleotides and polypeptides shown in Table 6 herein, to assemble predictor gene subsets such as in Tables 10-12 to be able to predict or reasonably foretell the likely effect of either src tyrosine inhibitor compounds or compounds that affect the src tyrosine kinase signaling pathway in different biological systems, or for cellular responses. The predictor gene sets can be used in in vitro assays of drug response by test cells to predict in vivo outcome. In accordance with this invention, the various predictor gene sets described herein, or the combination of these predictor sets with other polynucleotides and polypeptides or other co-variants of these polynucleotides and polypeptides, can be used, for example, to predict how patients with cancer or a tumor might respond to therapeutic intervention with compounds that modulate the src tyrosine kinase family. In addition, such predictor sets can be used to predict how patients might respond to therapeutic intervention(s) that modulate(s) signaling through the entire src tyrosine kinase regulatory pathway. The predictor sets of polynucleotides and polypeptides, or co-variants of these polynucleotides and polypeptides, can be used to predict how patients with a cancer or tumor respond to therapy employing compounds that modulate a tyrosine kinase, or the activity of a tyrosine kinase, such as protein tyrosine kinase members of the Src family, for example, Src, Fgr, Fyn, Yes, BLk, Hck, Lck and Lyn, as well as other protein tyrosine kinases, including, Bcr-abl, Jak, PDGFR, c-kit and Ephr.

[0021] A further object of the present invention is to provide polynucleotides and polypeptides comprising one or more predictor sets of polynucleotides and polypeptides that most highly correlate with resistance or sensitivity to drugs or compounds which are directly or indirectly involved with modulation of src tyrosine kinase or src tyrosine kinase signaling pathways. In accordance with this invention, predictor gene sets associated with resistance or sensitivity to src tyrosine kinase inhibitor compounds comprise the polynucleotides and polypeptides presented in FIGS. 1-3 and Tables 3-6 herein. Also according to the invention, the polynucleotides and polypeptides of Tables 3-6 have been discovered to be expressed by cells which are sensitive or resistant to four different src kinase inhibitor compounds. The expression of these polynucleotides and polypeptides, or combinations thereof, has been found to be highly correlated with sensitivity of cells to the different src kinase inhibitors. The expression patterns of the three sets of polynucleotides and polypeptides correlating with sensitivity of thirty-one colon cells to the src kinase inhibitor compounds are provided in FIGS. 1-3.

[0022] Yet another object of the present invention is to provide predictor polynucleotides and polypeptides or predictor gene sets having both diagnostic and prognostic value in disease areas in which signaling through src tyrosine kinase or the src tyrosine kinase pathway is involved, e.g., in cancers or tumors, or in disease states in which cell signaling and/or cellular proliferation controls are abnormal or aberrant. Also provided by this invention are common polynucleotides and polypeptides whose expression levels are strongly correlated with either sensitivity or resistance to all four of the src kinase inhibitor compounds (Table 6). Because these polynucleotides and polypeptides correlate to drug sensitivity and resistance classifications associated with all four of the src kinase inhibitor compounds in cells, such polynucleotides and polypeptides can be used to build predictors or markers for other biological systems in which src kinase activity or src or src family tyrosine kinases signaling pathways are involved.

[0023] Another object of the present invention is to provide one or more specialized microarrays, e.g., oligonucleotide microarrays or cDNA microarrays, comprising those polynucleotides and polypeptides, or combinations thereof, as described herein showing expression profiles that correlate with either sensitivity or resistance to one or more src kinase inhibitor compounds. Such microarrays can be employed in in vitro assays for assessing the expression level of the polynucleotides and polypeptides on the microarrays in the test cells from tumor biopsies, for example, and determining whether these test cells will be likely to be resistant or sensitive to src kinase inhibitor compounds. For example, one or more microarrays can be prepared using each of the polynucleotides and polypeptides, or combinations thereof, as described herein and shown in FIGS. 1-3 and Tables 3-6. Cells from a tissue or organ biopsy can be isolated and exposed to one or more of the inhibitor compounds.

[0024] Following application of nucleic acids isolated from both untreated and treated cells to one or more of the specialized microarrays, the pattern of gene expression of the tested cells can be determined and compared with that of the predictor gene pattern from the panel of cells used to create the predictor gene set on the microarray. Based upon the gene expression pattern results from the cells undergoing testing, it can be determined if the cells show a resistant or a sensitive profile of gene expression. Whether or not the tested cells from a tissue or organ biopsy will respond to one or more of the inhibitor compounds and the course of treatment or therapy can then be determined or evaluated based on the information gleaned from the results of the specialized microarray analysis.

[0025] It is a further object of the present invention to provide a kit for determining or predicting drug susceptibility or resistance by a patient having a disease, with particular regard to a cancer or tumor, namely, a colon cancer or tumor. Such kits would be useful in a clinical setting for use in testing patient's biopsied tumor or cancer samples, for example, to determine or predict if the patient's tumor or cancer will be resistant or sensitive to a given treatment or therapy with a drug, compound, chemotherapy agent, or biological agent that are directly or indirectly involved with modification, preferably, inhibition, of src tyrosine kinase activity or a cell signaling pathway involving src tyrosine kinase activity. Provided in the kit are one or more predictor gene sets, preferably comprising one or more microarrays, e.g., oligonucleotide microarrays or cDNA microarrays, comprising those polynucleotides and polypeptides that correlate with resistance and sensitivity to Src family of protein tyrosine kinases, for example, Src, Fgr, Fyn, Yes, Blk, Hck, Lck and Lyn, as well as inhibitors of the Bcr-abl, Jak, PDGFR, c-kit and Ephr protein tyrosine kinases; and, in suitable containers, the modulator agents/compounds for use in testing cells from patient tissue specimens or patient samples for resistance/sensitivity to compounds that inhibit src or src family tyrosine kinases activity; and instructions for use. In addition, kits contemplated by the present invention also include reagents or materials for the monitoring of the expression of the predictor or marker polynucleotides and polypeptides of the invention at the level of mRNA or protein, using other techniques and systems practiced in the art, e.g., RT-PCR assays, which employ primers designed on the basis of one or more of the predictor polynucleotides and polypeptides described herein, immunoassays, such as enzyme linked immunosorbent assays (ELISAs), immunoblotting, e.g., Western blots, or in situ hybridization, and the like, as further described herein.

[0026] Another object of the present invention is to provide one or more polynucleotides and polypeptides among those of the predictor polynucleotides and polypeptides identified herein that can serve as targets for the development of drug therapies for disease treatment. Such targets may be particularly applicable to treatment of colon disease, such as colon cancers or tumors. Because these predictor polynucleotides and polypeptides are differentially expressed in sensitive and resistant cells, their expression pattern is correlated with the relative intrinsic sensitivity of cells to treatment with compounds that interact with and/or inhibit protein tyrosine kinases, including members of the Src family of protein tyrosine kinases, for example, Src, Fgr, Fyn, Yes, Blk, Hck, Lck and Lyn, as well as the Bcr-abl, Jak, PDGFR, c-kit and Ephr protein tyrosine kinases. Accordingly, the polynucleotides and polypeptides highly expressed in resistant cells can serve as targets for the development of new drug therapies for those tumors which are resistant to protein tyrosine kinase inhibitor compounds.

[0027] Yet another object of the present invention is to provide antibodies, either polyclonal or monoclonal, directed against one or more of the src biomarker polypeptides, or peptides thereof, encoded by the predictor polynucleotides and polypeptides. Such antibodies can be used in a variety of ways, for example, to purify, detect, and target the src biomarker polypeptides of the present invention, including both in vitro and in vivo diagnostic, detection, screening, and/or therapeutic methods, and the like. Included among the protein tyrosine kinase biomarker polypeptides of this invention are members of the Src family of protein tyrosine kinases, for example, Src, Fgr, Fyn, Yes, Blk, Hck, Lck and Lyn, as well as the Bcr-abl, Jak, PDGFR, c-kit and Ephr protein tyrosine kinases.

[0028] Further objects, features, and advantages of the present invention will be better understood upon a reading of the detailed description of the invention when considered in connection with the accompanying figures or drawings.

### DESCRIPTION OF THE FIGURES

[0029] The file of this patent contains at least one Figure executed in color. Copies of this patent with color Figure(s) will be provided by the Patent and Trademark Office upon request and payment of the necessary fee.

[0030] FIG. 1 illustrates a gene expression pattern according to the present invention. The 123 polynucleotides and polypeptides that most highly correlated with a resistance/sensitivity phenotype classification of the 31 colon cell lines for BMS-A or BMS-D are shown. Each row corresponds to a gene, with the columns corresponding to expression levels in the different cell lines. Expression levels for each gene are normalized across the median expression level of all the 31 cell lines. The polynucleotides and polypeptides with expression levels greater than the median are shaded in red, and those below the median are shaded in green. The individual polynucleotides and polypeptides encoding the src biomarkers of the FIG. 1 are in the order as listed in Table 3.

[0031] FIG. 2 illustrates a gene expression pattern according to the present invention. The 119 polynucleotides and polypeptides most highly correlated with a resistance/sensitivity phenotype classification of the 31 colon cell lines for BMS-B are shown. Each row corresponds to a gene, with the columns corresponding to expression levels in the different cell lines. Expression levels for each gene are normalized across the median expression level of all the 31 cell lines. The polynucleotides and polypeptides with expression levels greater than the median are shaded in red, and those below the median are shaded in green. The individual polynucleotides and polypeptides encoding the src biomarkers of the FIG. 2 are in the order as listed in Table 4.

[0032] FIG. 3 illustrates a gene expression pattern according to the present invention. The 137 polynucleotides and polypeptides most highly correlated with a resistance/sensitivity phenotype classification of the 31 colon cell lines for BMS-C are shown. Each row corresponds to a gene, with the columns corresponding to expression levels in the different cell lines. Expression levels for each gene are normalized across the median expression level of all the 31 cell lines. The polynucleotides and polypeptides with expression levels greater than the median are shaded in red, and those below the median are shaded in green. The individual polynucleotides and polypeptides encoding the src biomarkers of the FIG. 3 are in the order as listed in Table 5.

[0033] FIG. 4 shows the error rates of prediction for the four src kinase inhibitor compounds, BMS-A, BMS-B, BMS-C and BMS-D in cross validation and random permutation tests. The Genecluster software was used to select polynucleotides and polypeptides and predict classifications using a “weighted-voting ‘leave one out’ cross-validation algorithm”, as described herein. A different number of polynucleotides and polypeptides was used in the predictor set for predicting resistant and sensitive classes to BMS-A, BMS-B, BMS-C and BMS-D in the colon cell lines. The real error rates were compared with the real error rates using the same number of polynucleotides and polypeptides as the predictor set in 20 cases, in which classification for the colon cell lines was randomly assigned. For example, when each predictor set contained 20 polynucleotides and polypeptides, the real error rate of prediction for BMS-A or BMS-D was 15.7%; for BMS-B and BMS-C, the real error rates were 19% and 16.2%, respectively. These error rate values are significantly lower than the real error rates obtained when random phenotype classifications are used for the cell lines (i.e., in a range of from 30% to 70%).

### DESCRIPTION OF THE TABLES

[0034] Table 1 shows the mean IC₅₀ of four src kinase inhibitors for each of the thirty-one colon cell lines. Thirty-one colon cell lines were treated with each of the four src tyrosine kinase inhibitor compounds, namely, BMS-A, BMS-B, BMS-C and BMS-D, and the IC₅₀ was assessed in the cells by MTS assays as described in Example 1 (Methods). The mean IC₅₀ values along with standard deviations (SD) were calculated from 2 to 5 individual determinations for each cell line for the results shown. The IC₅₀ unit is μM.

[0035] Table 2 shows the resistance/sensitivity classification of 31 colon cell lines for the four src kinase inhibitor compounds BMS-A, BMS-B, BMS-C and BMS-D. For each compound, the IC₅₀ for each cell line was log-transformed to log₁₀(IC₅₀), and the log₁₀(ICso) values were then normalized to the mean log₁₀(IC₅₀) across the 31 colon cell lines. The cell lines with log₁₀(IC₅₀) below the mean log₁₀(IC₅₀) of all 31 cell lines were defined as sensitive to the compound, while those with log₁₀(IC₅₀) above the mean log₁₀(IC₅₀) were considered to be resistant.

[0036] Table 3 shows a gene list that demonstrated a high correlation between expression pattern and resistance/sensitivity classification to BMS-A or BMS-D. The gene number, relative expression pattern, i.e., sensitive or resistant, Gene Accession number, gene description (Unigene cluster), SEQ ID NO: for the DNA sequence of the gene, and SEQ ID NO: for the amino acid sequence of the gene (if available), are presented in the table. For each gene, the DNA and encoded amino acid sequences represented by SEQ ID NOs. in the table are described in the Sequence Listing.

[0037] Table 4 presents a gene list that demonstrated high correlation between expression pattern and resistance/sensitivity classification to BMS-B. The gene number, relative expression pattern, i.e., sensitive or resistant, Gene Accession number, gene description (unigene cluster), SEQ ID NO: for the DNA sequence of the gene, and SEQ ID NO: for the amino acid sequence of the gene (if available), are presented in the table. For each gene, the DNA and encoded amino acid sequences represented by SEQ ID NOs. in the table are described in the Sequence Listing.

[0038] Table 5 presents a gene list that demonstrated high correlation between expression pattern and resistance/sensitivity classification to BMS-C. The gene number, relative expression pattern, i.e., sensitive or resistant, Gene Accession number, gene description (unigene cluster), SEQ ID NO: for the DNA sequence of the gene, and SEQ ID NO: for the amino acid sequence of the gene (if available), are presented in the table. For each gene, the DNA and encoded amino acid sequences represented by SEQ ID NOs. in the table are described in the Sequence Listing.

[0039] Table 6 presents a common gene list from Tables 3-5 showing the highest correlation between expression pattern and resistance/sensitivity classification of the cells to the four src kinase inhibitor compounds BMS-A/BMS-D, BMS-B and BMS-C. The gene description, accession number, DNA sequence, amino acid sequence (if available), and the corresponding nucleic acid and amino acid SEQ ID NOS are provided. The relative expression patterns of each gene i.e., sensitive or resistant, are indicated.

[0040] Table 7 presents a resistance/sensitivity prediction of the 31 colon cell lines for BMS-A or BMS-D, BMS-B and BMS-C using 10 markers as a predictor set shown in Table 10. The true class is assigned as in Table 2, based on the IC₅₀ results. The predicted class is determined by using the optimal 10 polynucleotides and polypeptides as the predictor set to predict the resistance or sensitive class. “S” represents Sensitive; “R” represents Resistant. The confidence score refers to prediction strength for each prediction made on a cell line by the predictor set. The confidence score ranges from 0 to 1, i.e., corresponding from low to high confidence in making the prediction. The error predictions are indicated by an asterisk (*).

[0041] Table 8 shows a resistance/sensitivity prediction of the 31 colon cell lines for or BMS-D, BMS-B and BMS-C using 15 markers as a predictor set shown in Table 11. The true class is assigned as in Table 2, based on the IC₅₀ results. The predicted class is determined by using the optimal 15 polynucleotides and polypeptides as the predictor set to predict the resistance or sensitive class. “S” represents Sensitive; “R” represents Resistant. The confidence score refers to prediction strength for each prediction made on a cell line by the predictor set. The confidence score ranges from 0 to 1, i.e., corresponding from low to high confidence in making the prediction. The error predictions are indicated by an asterisk (*).

[0042] Table 9 presents a resistance/sensitivity prediction of the 31 colon cell lines for BMS-A or BMS-D, BMS-B and BMS-C using 25 markers as a predictor set shown in Table 12. The true class is assigned as in Table 2, based on the IC₅₀ results. The predicted class is determined by using the optimal 25 polynucleotides and polypeptides as the predictor set to predict the resistance or sensitive class. “S” represents Sensitive; “R” represents Resistant. The confidence score refers to prediction strength for each prediction made on a cell line by the predictor set. The confidence score ranges from 0 to 1, i.e., corresponding from low to high confidence in making the prediction. The error predictions are indicated by an asterisk (*).

[0043] Table 10 lists the predictor set of 10 polynucleotides and polypeptides used in prediction as shown in Table 7. These 10 polynucleotides and polypeptides were elected from the 73 common (as shown in Table 6). Gene Accession number, gene description (Unigene cluster), and relative expression pattern, i.e., sensitive or resistant, for this 10-gene predictor subset, are indicated.

[0044] Table 11 lists the predictor set of 15 polynucleotides and polypeptides used in prediction as shown in Table 8. These 15 polynucleotides and polypeptides were selected from the 73 common (as shown in Table 6). Gene Accession number, gene description (Unigene cluster), and relative expression pattern, i.e., sensitive or resistant, for this 15-gene predictor subset, are indicated.

[0045] Table 12 lists the predictor set of 25 polynucleotides and polypeptides used in prediction as shown in Table 9. These 25 polynucleotides and polypeptides were selected from the 73 common (as shown in Table 6). Gene Accession number, gene description (Unigene cluster), and relative expression pattern, i.e., sensitive or resistant, for this 25-gene predictor subset, are indicated.

[0046] Table 13 show representative forward and reverse RT-PCR primers for each of the Src biomarker polynucleotides and polypeptides of the present invention, as identified by SEQ ID NO and Accession No. in Tables 3-5.

### DETAILED DESCRIPTION OF THE INVENTION

[0047] The present invention describes the identification of polynucleotides and polypeptides that correlate with drug sensitivity or resistance employing cell lines that are previously untreated with drug to determine sensitivity of the cells to a drug, compound, or biological agent. These polynucleotides and polypeptides, called marker or predictor polynucleotides and polypeptides herein, can be employed for predicting drug response. The marker polynucleotides and polypeptides have been determined in an in vitro assay employing microarray technology to monitor simultaneously the expression pattern of thousands of discrete polynucleotides and polypeptides in previously untreated cells, whose sensitivity to compounds or drugs, in particular, compounds that inhibit protein tyrosine kinase or protein tyrosine kinase activity, particularly src or src family tyrosine kinases, is tested. The protein tyrosine kinases, or activities thereof, associated with response to a drug, compound, or biological agent include, for example, members of the Src family of protein tyrosine kinases, for example, Src, Fgr, Fyn, Yes, Blk, Hck, Lck and Lyn, as well as the Bcr-abl, Jak, PDGFR, c-kit and Ephr protein tyrosine kinases. (See, e.g., P. Blume-Jensen and T. Hunter, 2001, “Oncogene Kinase Signaling”, Nature, 411:355-365).

[0048] This assay has allowed the identification of the marker polynucleotides and polypeptides, called src biomarkers herein, having expression levels in the cells that are highly correlated with drug sensitivity exhibited by the cells. Such marker polynucleotides and polypeptides serve as useful molecular tools for predicting a response to drugs, compounds, biological agents, chemotherapeutic agents, and the like, preferably those drugs and compounds, and the like, that affect protein tyrosine kinase activity, particularly src or src family tyrosine kinases activity, via direct or indirect inhibition or antagonism of protein tyrosine kinase function, particularly src or src family tyrosine kinases function or activity.

[0049] In its preferred aspect, the present invention describes polynucleotides and polypeptides that correlate with sensitivity or resistance of colon cell lines to treatment with protein tyrosine kinase inhibitor compounds, particularly src tyrosine kinase inhibitor compounds as described herein. The exposure of thirty-one colon cell lines to each of four src kinase inhibitor compounds provided a predictor set of polynucleotides and polypeptides for each compound that were most highly correlated with a resistance or sensitivity classification of the thirty-one colon cell lines to the inhibitor compounds. (FIGS. 1-3 and Tables 3-5). The src kinase inhibitor compounds utilized for identifying the gene predictor sets of this invention are described in WO 00/62778, published Oct. 26, 2000. Specifically, for the four src kinase inhibitor compounds analyzed, namely, BMS-A, BMS-B, BMS-C and BMS-D, the drug sensitivity classification for the thirty-one colon cell lines was the same for BMS-A and BMS-D; and 26 out of 31 colon cell lines have the same sensitivity classifications for all four src kinase inhibitor compounds as shown in the Table 2. One or more of these four compounds has a potent inhibitory activity for a number of protein tyrosine kinases, for example, members of the Src family of protein tyrosine kinases, including Src, Fgr, Fyn, Yes, BIk, Hck, Lck and Lyn, as well as the Bcr-abl, Jak, PDGFR, c-kit and Ephr protein tyrosine kinases. Although the predicter gene sets are most useful in predicting efficacy of one or more of these compounds for inhibiting Src kinase function and/or activity specifically, the predicter gene sers are also useful for predicting the efficacy of these compounds for inhibiting protein tyrosine kinases, in general, an in particularly Src, Fgr, Fyn, Yes, Blk, Hck, Lck and Lyn, as well as the Bcr-abl, Jak, PDGFR, c-kit and Ephr protein tyrosine kinases.

[0050] The expression of 123, 119 and 137 predictor polynucleotides and polypeptides, was found to correlate with resistance/sensitivity of the colon cell lines to BMS-A/BMS-D, BMS-B and BMS-C respectively. Common predictor polynucleotides and polypeptides were also determined for predicting a resistance/sensitivity classification of cells to the src kinase inhibitors. The common polynucleotides and polypeptides showing the highest correlation between their expression pattern and the resistance or sensitivity classification in the cell lines for the src kinase inhibitor compounds are presented in Table 6.

[0051] In accordance with the invention, an approach has been discovered in which polynucleotides and polypeptides and combinations of polynucleotides and polypeptides have been identified whose expression pattern, in a subset of cell lines, correlates to and can be used as an in vitro predictor of cellular response to treatment or therapy with one compound, or with a combination or series of compounds, that are known to inhibit or activate the function of a protein, enzyme, or molecule (e.g., a receptor) that is directly or indirectly involved in cell proliferation, cell responses to external stimuli, (such as ligand binding), or signal transduction, e.g., a tyrosine kinase. Preferred are antagonists or inhibitors of the function of a given protein, e.g., a tyrosine kinase.

[0052] In a preferred aspect, specific src tyrosine kinase inhibitor compounds, BMS-A, BMS-B, BMS-C and BMS-D were employed to determine drug sensitivity in a panel of colon cell lines following exposure of the cells to the compounds. Some of the cell lines were determined to be resistant to treatment with the inhibitor compounds, while others were determined to be sensitive to the inhibitors (Tables 1 and 2). A subset of the cell lines examined provided an expression pattern or profile of polynucleotides and polypeptides, and combinations of polynucleotides and polypeptides, that correlated to and serve as a predictor of, a response by the cells to these inhibitor compounds, and to compounds having similar modes of action and/or structure. (FIGS. 1-3 and Tables 7-12).

[0053] Such a predictor set of cellular gene expression patterns correlating with sensitivity or resistance of cells following exposure of the cells to a drug, or a combination of drugs, provides a useful tool for screening a tumor sample before treatment with the drug, or a similar drug, or drug combination. The screening technique allows a prediction of cells of a tumor sample exposed to a drug, or a combination of drugs, based on the gene expression results of the predictor set, as to whether or not the tumor, and hence a patient harboring the tumor, will or will not respond to treatment with the drug or drug combination.

[0054] In addition, the predictor polynucleotides and polypeptides or predictor gene set can also be utilized as described herein for monitoring the progress of disease treatment or therapy in those patients undergoing treatment for a disease involving a src or src family tyrosine kinases inhibitor compound or chemotherapeutic agent.

[0055] According to a particular embodiment of the present invention, oligonucleotide microarrays were utilized to measure the expression levels of over 12,000 polynucleotides and polypeptides in a panel of thirty-one untreated colon cell lines for which the drug sensitivity to four src kinase inhibitor compounds was determined. This analysis was performed to determine whether the gene expression signatures of untreated cells were sufficient for the prediction of chemosensitivity. Data analysis allowed the identification of marker polynucleotides and polypeptides whose expression levels were found to be highly correlated with drug sensitivity. In addition, the treatment of untreated cells with drug also provided gene expression signatures predictive of resistance to the compounds. Subsequent data analysis allowed the identification of marker polynucleotides and polypeptides whose expression levels were found to be highly correlated with drug resistance. Thus, in one of its embodiments, the present invention provides these polynucleotides and polypeptides, or “markers”, or predictors, which show utility in predicting drug response upon treatment or exposure of cells to drug. In particular, the marker or predictor polynucleotides and polypeptides are src biomarker polynucleotides and polypeptides encoding src biomarker proteins/polypeptides.

[0056] The means of performing the gene expression and marker gene identification analyses embraced by the present invention is described in further detail and without limitation herein below.

### IC₅₀ Determination and Phenotype Classification Based on Sensitivity of Thirty-One Colon Cell Lines to src Kinase Inhibitor Compounds

[0057] Thirty-one colon cell lines were treated with each of four src tyrosine kinase inhibitor compounds (BMS-A, BMS-B, BMS-C and BMS-D) to determine the IC₅₀ value for each cell line. The average IC₅₀ values, along with standard deviations, were calculated from 2 to 5 individual determinations for each cell line. As shown in Table 1, a large variation in the IC₅₀ values (>1000-fold) was observed for these compounds among the thirty-one cell lines.

[0058] The IC₅₀ value for each cell line was log₁₀ transformed. The mean of log₁₀(IC₅₀) across the thirty-one colon cell lines was calculated for each compound. The value of log₁₀(C₅₀) for each cell line was compared to the mean value of log₁₀(IC₅₀) across the thirty-one colon cell lines for each drug. The cell lines with a log₁₀(IC₅₀) below the mean of log₁₀(IC₅₀) were classified as sensitive to the compound, and those with an log₁₀(IC₅₀) above the mean of log₁₀(IC₅₀) were classified as resistant. Table 2 represents the resistance/sensitivity classifications of the thirty-one colon cell lines for BMS-A, BMS-B, BMS-C and BMS-D, respectively.

[0059] As demonstrated in Table 2, the drug sensitivity classification for the thirty-one colon cell lines was the same for BMS-A and BMS-D even though the IC₅₀ for these two compounds was not identical for each cell line. It was also demonstrated that most of the cell lines (26 out of 31) had the same resistance/sensitivity classification for all four of the src kinase inhibitor compounds tested. Five cell lines appeared to have different classifications for the four src kinase inhibitor compounds as indicated in the Table 2.

### Identifying Genes that Significantly Correlated with Drug Resistance/Sensitivity Classification

[0060] Expression profiling data of 12,558 polynucleotides and polypeptides represented on the HG-U95Av2 array for thirty-one untreated colon cell lines were obtained and preprocessed as described in Example 1, Methods. The preprocessed data were analyzed using the K-mean Nearest Neighborhood (KNN) algorithm to identify polynucleotides and polypeptides whose expression patterns were strongly correlated with the drug resistance/sensitivity classification. (Table 2). An “idealized expression pattern” corresponds to a gene that is uniformly high in one class (e.g., sensitive) and uniformly low in the other class (e.g., resistant). Initially, a KNN analysis was performed in which a correlation coefficient was obtained for each gene. The correlation coefficient, which is a measure of relative classification separation, is obtained using the following formula:
P(g,c)=(μ1−μ2)/(σ1+σ2).

[0061] In the above formula, for P(g,c), P represents correlation coefficient; g represents gene expression; and c represents classification.
[0062] μ1 represents the mean gene expression level of samples in class 1;
[0063] μ2 represents the mean gene expression level of samples in class 2;
[0064] σ1 represents the standard deviation of gene expression for samples in class 1;
   and σ2 represents the standard deviation of gene expression for samples in class 2

[0065] Large values of P(g,c) indicate a strong correlation between gene expression and resistance/sensitivity classification. When the correlation is compared with that in a random permutation test (randomly assigned classification), a significance measurement is obtained. Then, the polynucleotides and polypeptides can be ranked according to the correlation coefficient obtained from this analysis, with the highest value indicating the best correlation of gene expression level with the resistance/sensitivity classification to the src kinase inhibitor compounds in the thirty-one colon cell lines.

[0066] The KNN analysis demonstrated that many polynucleotides and polypeptides correlated with the drug resistance/sensitivity classification for all four of the test compounds. Therefore, for greater stringency, two different methods were applied to select a smaller subset of polynucleotides and polypeptides that correlated with the drug resistance/sensitive classification for all of the compounds:

[0067] First, a permutation test was performed to calculate the significance of the correlation coefficients obtained in the above-described KNN analysis for the top 200 polynucleotides and polypeptides. Those polynucleotides and polypeptides whose ‘p’ value was less than or equal to 0.05 were selected. Second, a T-test was performed and those polynucleotides and polypeptides with a ‘p’ value that was equal to or less than 0.05 were selected.

[0068] Gene lists from the two analysis methods were obtained for each compound. When these analyses were performed, it was observed that there were 123 polynucleotides and polypeptides as listed in Table 3 to be correlated with the drug resistance/sensitivity classification for compound BMS-A or BMS-D as shown in FIG. 1. Of the 123 polynucleotides and polypeptides, 60 were highly expressed in the cell lines that were classified as sensitive to BMS-A or BMS-D, and 63 polynucleotides and polypeptides were highly expressed in the cell lines that were classified as resistant to BMS-A or BMS-D. The same approach was used to select polynucleotides and polypeptides (are listed in Tables 4 and 5) correlated with the drug resistance/sensitivity classification for BMS-B and BMS-C, respectively. The expression patterns of the polynucleotides and polypeptides listed in Tables 3-5 are presented in FIGS. 1-3, which showed correlation with drug resistance/sensitivity classifications for the compound BMS-A/BMS-D, BMS-B and BMS-C, respectively.

[0069] Tables 3-5 also show that 73 polynucleotides and polypeptides selected from the above-described analyses are in common among all of the four test compounds (common polynucleotides and polypeptides are shown in Table 6). Thirty-one of the common polynucleotides and polypeptides are highly expressed in cell lines that are classified as sensitive, and 42 of the polynucleotides and polypeptides are highly expressed in cell lines that are classified as resistant. Because these common polynucleotides and polypeptides correlate with drug sensitivity and resistance classifications, they can be used to build predictors for other biological systems as described below.

[0070] As used herein, the terms “agent” or “compounds” are meant to encompass any composition capable of modulating a protein tyrosine kinase of the present invention including Src, Fgr, Fyn, Yes, Blk, Hck, Lck and Lyn, as well as other protein tyrosine kinases, including, Bcr-abl, Jak, PDGFR, c-kit and Ephr, either directly or indirectly, and includes small molecule compounds, antisense reagents, antibodies, and the like.

[0071] As used herein, the terms “modulate” or “modulates” refer to an increase or decrease in the amount, quality or effect of a particular activity, DNA, RNA, or protein. The definition of “modulate” or “modulates” as used herein is meant to encompass agonists and/or antagonists of a particular activity, DNA, RNA, or protein. The term “modulate” or “modulates” is also meant to encompass an increase or decrease in cellular activity, which necessarily includes a cells ability to differentiate, proliferate, mobilize, metastasize, and/or any other activity that may be associated with a cells transformation into a proliferative and/or oncogenic state.

### Utility of Highly Correlated Polynucleotides and Polypeptides to Make Predictions

[0072] Genes that correlate to a specific property of a biological system can be used to make predictions about that biological system and other biological systems. The Genecluster software can be used to select polynucleotides and polypeptides and combinations of polynucleotides and polypeptides that can predict properties using a “weighted-voting cross-validation algorithm” (T. R. Golub et al., 1999, Science, 286:531-537). In particular, the Genecluster software was used to build predictors that demonstrate the utility of polynucleotides and polypeptides that correlate to drug sensitivity and resistance.

[0073] As used herein, the terms “predictor” or “predictor sets” are used as follows: a predictor refers to a single gene, or combination of polynucleotides and polypeptides, whose expression pattern or properties can be used to make predictions, with different error rates, about a property or characteristic of any given biological system.

[0074] The ability of gene expression patterns to predict a resistance/sensitive classification was further investigated using a Weighted Voting algorithm which uses a cross-validation strategy as described by T. R. Golub et al., 1999, Science, 286:531-537. The program was formatted to select the optimal number of polynucleotides and polypeptides whose expression pattern could be used to predict, with optimal accuracy, the classification of a cell line based on resistance or sensitivity toward a src tyrosine kinase inhibitor compound, e.g., BMS-A, BMS-B, BMS-C or BMS-D. A brief description of the cross-validation strategy of the program is described.

[0075] Based on the leave one out cross-validation strategy, a total of thirty-one prediction analyses (i.e., the number of cell lines in the data set) were performed in an iterative manner and the results of all thirty-one prediction analyses were combined to select the optimal number of polynucleotides and polypeptides that had optimal predictive accuracy. In each separate prediction analysis, one cell line was withheld from the data set, and an optimal number gene predictor was built based on the remaining thirty cell lines and subsequently used to predict the class of the withheld sample.

[0076] FIG. 4 shows the real error rates using different numbers of polynucleotides and polypeptides in the predictor set for predicting resistant and sensitive classes to BMS-A, BMS-B, BMS-C and BMS-D in the colon cell lines. The real error rates were compared with the real error rates using the same number of polynucleotides and polypeptides as the predictor set in 20 cases, in which classification for the colon cell lines was randomly assigned. For example, when each predictor-set contained 20 polynucleotides and polypeptides, the real error rate for BMS-A or BMS-D was 15.7%; for BMS-B and BMS-C, the real error rates were 19% and 16.2%, respectively. This result demonstrated that these error rate values are significantly lower than the real error rates obtained when random phenotype classifications are used for the cell lines (i.e., in a range of from 30% to 70%).

[0077] Table 7 presents a true resistance/sensitivity prediction of the 31 colon cell lines for BMS-A or BMS-D, BMS-B and BMS-C using 10 markers as a predictor set (as listed in Table 10). For BMS-A or BMS-D, twenty-eight out of thirty-one cell lines were correctly predicted using the optimal 10-gene predictor set. Two resistant cell lines, CX-1 and SW-403, were predicted to be sensitive to BMS-A or BMS-D, while one sensitive cell lines, HCT-15, were predicted to be resistant to BMS-A or BMS-D. This resulted in a 10%% real error rate (the real error rate is calculated by taking the average of the error rate in each class), calculated as follows:

$$\frac{( 2 / 22 resistant + 1 / 9 sensitive )}{2} \times 100 \% \text{)}$$

[0078] Different real error rates were obtained for BMS-B and for BMS-C. For BMS-B, the optimal 10-gene predictor correctly predicted the sensitivity or resistance of 28 cell lines. The predictor made three errors. Two wrong predictions were made in the sensitive classes (calling them resistant). This resulted in an 11.6% real error rate calculated as follows:

$$\frac{( 1 / 20 resistant + 2 / 11 sensitive )}{2} \times 100 \% \text{)}$$

[0079] For BMS-C, the optimal 10-gene predictor set predicted 29 cell lines correctly. The predictor only made 2 errors in the sensitive classes. This resulted in an 8.3% real error rate calculated as follows:

$$\frac{( 0 / 19 resistant + 2 / 12 sensitive )}{2} \times 100 \% \text{)}$$

[0080] In addition, a confidence score for each prediction made on a cell line by the predictor set can be obtained from the Genecluster software. The confidence score ranges from 0 to 1, measuring the margin of victory in each prediction using weighted-voting algorithms (see T. R. Golub et al., 1999, Science, 286:531-537). The confidence score values for each cell line using the optimal 10-gene predictor set obtained as described are shown in Tables 7.

[0081] It will be appreciated that the exact number of polynucleotides and polypeptides that should comprise an optimal predictor set is not definitely established or defined. It is unlikely in the real world that any predictor set can be obtained with 100% accuracy. This is due to the fact that there is a trade-off between the amount of additional information and robustness that are gained by adding more polynucleotides and polypeptides, and the amount of noise that is concomitantly added. In accordance with the present invention, different numbers of polynucleotides and polypeptides were tested in the predictor sets; data were obtained, analyzed and presented for a predictor set comprising 10, or 15 or 25 predictor or marker polynucleotides and polypeptides as demonstrated in Table 7-9. The selection of marker polynucleotides and polypeptides for use in the prediction set was well within the total number of polynucleotides and polypeptides that strongly correlated with the sensitivity class distinction (Tables 3-6). As shown in Table 8, when a predictor set comprising 15 of marker polynucleotides and polypeptides (as listed in Table 11), the error rate for prediction sensitivity of BMS-A/BMS-D, BMS-B and BMS-C was 12.4%, 7% and 4%, respectively. Again, different error rates were obtained when a predictor set comprising 25 of marker polynucleotides and polypeptides as shown in Table 9 and Table 12.

[0082] Thus, in accordance with the present invention, an approach has been developed in which polynucleotides and polypeptides and combinations of polynucleotides and polypeptides have been discovered, whose expression pattern in a subset of cell lines correlates with, and can be used as a predictor of, in vitro response to treatment with a series of compounds that inhibit the function of src tyrosine kinases.

[0083] Predictor sets, error rates and algorithms used to demonstrate utility

[0084] The number of polynucleotides and polypeptides in any given predictor may influence the error rate of the predictor set in cross-validation experiments and with other mathematical algorithms. The data show that the error rate of a predictor is somewhat dependent on the number of polynucleotides and polypeptides in the predictor set and the contribution of each individual gene in the given predictor set and the number of cell lines that are tested in the cross validation experiment. For example, in a given predictor set, one gene may contribute more significantly than the other polynucleotides and polypeptides to the prediction.

[0085] It is very likely that if a gene significantly contributes to a predictor set, then it can be used in different combinations with other polynucleotides and polypeptides to achieve different error rates in different predictor sets, e.g., gene A alone gives an error rate of 30%. In combination with polynucleotides and polypeptides, B, C and D, the error rate becomes 10%; in combination with polynucleotides and polypeptides B, D and E, the error rate becomes 12%; while a combination of gene A with polynucleotides and polypeptides E-X gives an error rate of 8%, and so on. The error rates as described herein apply to the set of cell lines used in the cross-validation experiment. If a different set is used, or more cell lines are added to the original set tested, then different error rates may be obtained as described and understood by the skilled practitioner. Importantly, different combinations of polynucleotides and polypeptides that correlate to drug sensitivity can be used to build predictors with different prediction accuracy.

### Applications of Predictor Sets

[0086] Predictor sets with different error rates may be used in different applications. Predictor sets can be built from any combination of the polynucleotides and polypeptides listed in Tables 3-6, or the predictor gene subsets of 25, 15, and 7 polynucleotides and polypeptides, as presented in Tables 7, 8, 9, 10, 11, and 12, respectively, to make predictions about the likely effect of either src tyrosine inhibitor compounds or compounds that affect the src tyrosine kinase signaling pathway in different biological systems. The various predictor sets described herein, or the combination of these predictor sets with other polynucleotides and polypeptides or other co-variants of these polynucleotides and polypeptides, are likely to have broad utility. For example, they can be used as diagnostic or prognostic indicators in disease management; they can be used to predict how patients with cancer might respond to therapeutic intervention with compounds that modulate the src tyrosine kinase family; and they can be used to predict how patients might respond to therapeutic intervention that modulate signaling through the entire src tyrosine kinase regulatory pathway.

[0087] While the data described herein were generated in cell lines-that are routinely used to screen and identify compounds that have potential utility for cancer therapy, the predictors may have both diagnostic and prognostic value in other diseases areas in which signaling through protein tyrosine kinases, particularly src tyrosine kinase or the src tyrosine kinase pathway is of importance, e.g., in immunology, or in cancers or tumors in which cell signaling and/or proliferation controls have gone awry. Such protein tyrosine kinases and their pathways comprise, for example, members of the Src family of tyrosine kinases, for example, Src, Fgr, Fyn, Yes, Blk, Hck, Lck and Lyn, as well as other protein tyrosine kinases, including, Bcr-abl, Jak, PDGFR, c-kit and Ephr.

[0088] Further, although the data described herein have been generated using the particularly exemplified src tyrosine kinase inhibitor compounds, namely, BMS-A, BMS-B, BMS-C and BMS-D, the predictors may have both diagnostic and prognostic value related to any molecules or therapeutic interventions that affect src tyrosine kinases or the src tyrosine kinase signaling pathways.

[0089] Those having skill in the pertinent art will appreciate that protein tyrosine kinase pathways, e.g., the Src tyrosine kinase pathway, is used and functional in cell types other than cell lines of colon tissue. Therefore, the described predictor set of polynucleotides and polypeptides, or combinations of polynucleotides and polypeptides within the predictor set, may show utility for predicting drug sensitivity or resistance to compounds that interact with or inhibit the src tyrosine kinase activity in cells from other tissues or organs associated with a disease state, or cancers or tumors derived from other tissue types. Non-limiting examples of such cells, tissues and organs include colon, breast, lung, prostate, testes, ovaries, cervix, esophagus, pancreas, spleen, liver, kidney, stomach, lymphocytic and brain, thereby providing a broad and advantageous applicability to the predictor gene sets described herein. Cells for analysis can be obtained by conventional procedures as known in the art, for example, tissue biopsy, aspiration, sloughed cells, e.g., colonocytes, clinical or medical tissue or cell sampling procedures.

### Functionality of Polynucleotides and Polypeptides that Make Up a Predictor Set

[0090] The use of a predictor, or predictor set, (e.g., predictor polynucleotides and polypeptides, or a predictor set of polynucleotides and polypeptides) is simply for predicting an outcome prior to having any knowledge about a biological system. Essentially, a predictor can be considered to be a statistical tool. The predictor is useful primarily in predicting the phenotype that is used to classify the biological system. In the specific embodiment provided by the present invention, the classification as “resistant” or “sensitive” is based on the log₁₀(IC₅₀) value of each cell line to a compound (e.g., the src kinase inhibitor compounds BMS-A, BMS-B, BMS-C or BMS-D as exemplified herein), relative to the mean log₁₀(IC₅₀) value of the cell line panel (e.g., a thirty-one colon cell line panel, as exemplified herein).

[0091] A number of the polynucleotides and polypeptides as described herein (Tables 3-6) are known to be substrates for the src tyrosine kinase family, e.g., caveolin-1, caveolin-2, phosphoinositide 3-kinase, etc., (M. T. Brown and J. A. Cooper, 1996, Biochemica et Biophysica Acta, 1287:121-149). This is expected, since polynucleotides and polypeptides that contribute to a high predictor accuracy are likely to play a functional role in the pathway that is being modulated. For example, Herceptin therapy (i.e., antibody that binds to the Her2 receptor and prevents function via internalization) is indicated when the Her2 gene is overexpressed. It is unlikely that a therapy will have any therapeutic effect if the target enzyme is not expressed.

[0092] However, although the complete function of all of the polynucleotides and polypeptides and their functional products (proteins and mRNAs) that make up a predictor set are not currently known, some of the polynucleotides and polypeptides are likely to be directly involved in the src tyrosine signaling pathway. In addition, some of the polynucleotides and polypeptides in the predictor set may be indirectly related to src signaling pathways. In addition, some of the polynucleotides and polypeptides in the predictor set may function in the metabolic or other resistance pathways specific to the compounds tested. Notwithstanding, a knowledge about the function of the polynucleotides and polypeptides is not a requisite for determining the accuracy of a predictor according to the practice of the present invention.

[0093] It has been demonstrated that different predictor sets are necessary to achieve the lowest error rate for the different compounds as tested herein. This is due to the subset of the cell lines that show different responses to the different compounds. Therefore, in the discovery process of building a predictor, the classification of a cell as either resistant or sensitive to a particular compound, or series of compounds, will impact the final set of polynucleotides and polypeptides that comprise the best predictor/predictor set. Because different combinations of resistant and sensitive cells were used for each compound, different predictor sets were obtained. In addition, obtaining different predictor sets for different compounds can be avoided if those cell lines having common resistant or sensitive classifications of gene marker expression are use (see, e.g., the 26 cell lines presented in Table 2).

[0094] The data presented herein also reveal that there are common polynucleotides and polypeptides for the four different compounds (see, e.g., Table 6). It is likely that these polynucleotides and polypeptides will have some role, whether direct or indirect, in the src tyrosine kinase pathway. Alternatively, these polynucleotides and polypeptides can be important in intrinsically determining the sensitivity of a cell to src signaling or inhibition.

[0095] As described herein, polynucleotides and polypeptides have been discovered that correlate to the relative intrinsic sensitivity or resistance of colon cell lines to treatment with compounds that interact with and inhibit src tyrosine kinases. These polynucleotides and polypeptides have been shown, through a weighted voting cross validation program, to have utility in predicting the intrinsic resistance and sensitivity of colon cell lines to these compounds.

[0096] An embodiment of the present invention relates to a method of determining or predicting if an individual requiring drug or chemotherapeutic treatment or therapy for a disease, for example, a cancer or tumor of a particular type, will be likely to successfully respond or not respond to the drug or chemotherapeutic agent prior to subjecting the individual to such treatment or chemotherapy. Preferably, the drug or chemotherapeutic agent is one that modulates protein tyrosine kinases, particularly src activity or src family tyrosine kinases activity or signaling involving src or src family tyrosine kinases. In accordance with the method of the invention, cells from a tissue or organ associated with disease, e.g., a patient biopsy of a tumor or cancer, preferably a colon cancer or tumor biopsy, are subjected to an in vitro assay as described herein, to determine their marker gene expression pattern (polynucleotides and polypeptides from Table 3-6) prior to their treatment with the compound or drug, particularly a protein tyrosine kinase inhibitor, preferably a src kinase inhibitor. The resulting gene expression profile of the cells before drug treatment is compared with the gene expression pattern of the same polynucleotides and polypeptides in cells that are either resistant or sensitive to the drug or compound, as provided by the present invention, i.e., FIGS. 1-3.

[0097] Success or failure of treatment of a patient's cancer or tumor with the drug can be determined based on the gene expression pattern of the patient's cells being tested, compared with the gene expression pattern of the predictor polynucleotides and polypeptides in the resistant or sensitive panel of that have been exposed to the drug or compound and subjected to the predictor gene analysis detailed herein. Thus, if, following exposure to the drug, the test cells show a gene expression pattern corresponding to that of the predictor gene set of the control panel of cells that are sensitive to the drug or compound, it is highly likely or predicted that the individual's cancer or tumor will respond favorably to treatment with the drug or compound. By contrast, if, after drug exposure, the test cells show a gene expression pattern corresponding to that of the predictor gene set of the control panel of cells that are resistant to the drug or compound, it is highly likely or predicted that the individual's cancer or tumor will not respond to treatment with the drug or compound.

[0098] As a related and more particular embodiment, the present invention relates to a method of determining or predicting if an individual requiring drug or chemotherapeutic treatment or therapy for a disease, for example, a breast cancer or a breast tumor, will be likely to successfully respond or not respond to the drug or chemotherapeutic agent prior to subjecting the individual to such treatment or chemotherapy. In this embodiment, the drug or chemotherapeutic agent is preferably one that modulates src tyrosine kinase activity or signaling involving src tyrosine kinase. In accordance with the method of the invention, cells from a tissue or organ associated with disease, e.g., a patient biopsy of a tumor or cancer, preferably a colon cancer or tumor biopsy, are subjected to an in vitro assay as described herein, to determine their marker gene expression pattern (polynucleotides and polypeptides from Tables 3 thru 6 and/or the predictor gene subsets of Tables 10 thru 12) prior to their treatment with the src tyrosine kinase inhibitor compound or drug. The resulting gene expression profile of the cells before drug treatment is compared with the gene expression pattern of the same polynucleotides and polypeptides in cells that are either resistant or sensitive to the drug or compound, as provided by the present invention.

[0099] In another related embodiment, the present invention includes a method of predicting, prognosing, diagnosing, and/or determining whether an individual requiring drug therapy for a disease state or chemotherapeutic for cancer (e.g., colon cancer) will or will not respond to treatment prior to administration of treatment. The treatment or therapy preferably involves a protein tyrosine kinase modulating agent, compound, or drug, for example, an inhibitor of the protein tyrosine kinase activity. Protein tyrosine kinases include, without limitation, members of the Src family of tyrosine kinases, for example, Src, Fgr, Fyn, Yes, Blk, Hck, Lck and Lyn, as well as other protein tyrosine kinases, including, Bcr-abl, Jak, PDGFR, c-kit and Ephr. Preferred is src tyrosine kinase and inhibitors thereof. In accordance with this embodiment, cells from a patient's tissue sample, e.g., a colon tumor or cancer biopsy, are assayed to determine their gene expression pattern prior to treatment with the protein tyrosine kinase modulating agent, compound, or drug. The resulting gene expression profile of the test cells before exposure to the compound or drug is compared with that of one or more of the predictor subsets of polynucleotides and polypeptides comprising either 25, 15, or 10 polynucleotides and polypeptides as described herein and shown in Tables 10 thru 12, respectively.

[0100] In a related embodiment, screening assays are provided for determining if a patient's cancer or tumor is or will be susceptible or resistant to treatment with a drug or compound, particularly, a drug or compound directly or indirectly involved in src or src family tyrosine kinases activity or the src kinase pathway.

[0101] Also provided are monitoring assays to monitor the progress of a drug treatment involving drugs or compounds that interact with or inhibit protein tyrosine kinases, particularly src or src family tyrosine kinases activity. Protein tyrosine kinases encompassed by these monitoring assays include members of the Src family of tyrosine kinases, for example, Src, Fgr, Fyn, Yes, Blk, Hck, Lck and Lyn, as well as other protein tyrosine kinases, including, Bcr-abl, Jak, PDGFR, c-kit and Ephr. Such in vitro assays are capable of monitoring the treatment of a patient having a disease treatable by a compound or agent that modulates or interacts with a src tyrosine kinase by comparing the resistance or sensitivity gene expression pattern of cells from a patient tissue sample, e.g., a tumor or cancer biopsy, preferably a colon cancer or tumor sample, prior to treatment with a drug or compound that inhibits src or src family tyrosine kinases activity and again following treatment with the drug or compound with the expression pattern of one or more of the predictor gene sets described, or combinations thereof. Isolated cells from the patient are assayed to determine their gene expression pattern before and after exposure to a compound or drug, preferably a src or src family tyrosine kinases inhibitor, to determine if a change of the gene expression profile has occurred so as to warrant treatment with another drug or agent, or discontinuing current treatment. The resulting gene expression profile of the cells tested before and after treatment is compared with the gene expression pattern of the predictor set of polynucleotides and polypeptides that have been described and shown herein to be highly expressed in cells that are either resistant or sensitive to the drug or compound. Alternatively, a patient's progress related to drug treatment or therapy can be monitored by obtaining a gene expression profile as described above, only after the patient has undergone treatment with a given drug or therapeutic compound. In this way, there is no need to test a patient sample prior to treatment with the drug or compound.

[0102] Such a monitoring process can indicate success or failure of a patient's treatment with a drug or compound based on the gene expression pattern of the cells isolated from the patient's sample, e.g., a tumor or cancer biopsy, as being relatively the same as or different from the gene expression pattern of the predictor gene set of the resistant or sensitive control panel of cells that have been exposed to the drug or compound and assessed for their gene expression profile following exposure. Thus, if, after treatment with a drug or compound, the test cells show a change in their gene expression profile from that seen prior to treatment to one which corresponds to that of the predictor gene set of the control panel of cells that are resistant to the drug or compound, it can serve as an indicator that the current treatment should be modified, changed, or even discontinued. Also, should a patient's response be one that shows sensitivity to treatment by a src or src family tyrosine kinases inhibitor compound, based on correlation of the expression profile of the predictor polynucleotides and polypeptides of cells showing drug sensitivity with the gene expression profile from cells from a patient undergoing treatment, the patient's treatment prognosis can be qualified as favorable and treatment can continue. Further, if a patient has not been tested prior to drug treatment, the results obtained after treatment can be used to determine the resistance or sensitivity of the cells to the drug based on the gene expression profile compared with the predictor gene set.

[0103] In a related embodiment, the present invention embraces a method of monitoring the treatment of a patient having a disease treatable by a compound or agent that modulates a protein tyrosine kinase, i.e., colon cancer. Protein tyrosine kinases encompassed by such treatment monitoring assays include members of the Src family of tyrosine kinases, for example, Src, Fgr, Fyn, Yes, Blk, Hck, Lck and Lyn, as well as other protein tyrosine kinases, including, Bcr-abl, Jak, PDGFR, c-kit and Ephr. For these assays, test cells from the patient are assayed to determine their gene expression pattern before and after exposure to a protein tyrosine kinase inhibitor compound or drug. The resulting gene expression profile of the cells tested before and after treatment is compared with the gene expression pattern of the predictor set of polynucleotides and polypeptides that have been described and shown herein to be highly expressed in cells that are either resistant or sensitive to the drug or compound. Thus, if a patient's response is or becomes one that is sensitive to treatment by a protein tyrosine kinase inhibitor compound, based on correlation of the expression profile of the predictor polynucleotides and polypeptides, the patient's treatment prognosis can be qualified as favorable and treatment can continue. Also, if after treatment with a drug or compound, the test cells do not exhibit a change in their gene expression profile to a profile that corresponds to that of the control panel of cells that are sensitive to the drug or compound, this serves as an indicator that the current treatment should be modified, changed, or even discontinued. Such monitoring processes can be repeated as necessary or desired and can indicate success or failure of a patient's treatment with a drug or compound, based on the gene expression pattern of the cells isolated from the patient's sample. The monitoring of a patient's response to a given drug treatment can also involve testing the patient's cells in the assay as described, only after treatment, rather than before and after treatment, with drug or active compound.

[0104] In a preferred embodiment, the present invention embraces a method of monitoring the treatment of a patient having a disease treatable by a compound or agent that modulates a src tyrosine kinase, i.e., colon cancer. The test cells from the patient are assayed to determine their gene expression pattern before and after exposure to a src tyrosine kinase inhibitor compound or drug. The resulting gene expression profile of the cells tested before and after treatment is compared with the gene expression pattern of the predictor set of polynucleotides and polypeptides that have been described and shown herein to be highly expressed in cells that are either resistant or sensitive to the drug or compound. Thus, if a patient's response is or becomes one that is sensitive to treatment by a src tyrosine kinase inhibitor compound, based on correlation of the expression profile of the predictor polynucleotides and polypeptides, the patient's treatment prognosis can be qualified as favorable and treatment can continue. Also, if after treatment with a drug or compound, the test cells do not exhibit a change in their gene expression profile to a profile that corresponds to that of the control panel of cells that are sensitive to the drug or compound, this serves as an indicator that the current treatment should be modified, changed, or even discontinued. Such monitoring processes can be repeated as necessary or desired and can indicate success or failure of a patient's treatment with a drug or compound, based on the gene expression pattern of the cells isolated from the patient's sample. The monitoring of a patient's response to a given drug treatment can also involve testing the patient's cells in the assay as described only after treatment, rather than before and after treatment, with drug or active compound.

[0105] In another embodiment, the present invention encompasses a method of classifying whether a biological system, preferably cells from a tissue, organ, tumor or cancer of an afflicted individual, will be resistant or sensitive to a compound that modulates the system. In a preferred aspect of this invention, the sensitivity or resistance of cells, e.g., those obtained from a tumor or cancer, to a src tyrosine kinase inhibitor compound, or series of compounds, is determined. According to the method, a resistance/sensitivity profile of the cells after exposure to the src kinase inhibitor drug or compound can be determined via gene expression profiling protocols set forth herein. Such resistance/sensitivity profile of the cells reflects an IC₅₀ value of the cells to the compound(s) as determined using a suitable assay, such as an in vitro cytotoxicity assay as described in Example 1. A procedure of this sort can be performed using a variety of cell types and compounds that interact with src tyrosine kinase, or affect its activity in the src or src family tyrosine kinases signaling pathway.

[0106] In another of its embodiments, the present invention contemplates the preparation of one or more specialized microarrays (e.g., oligonucleotide microarrays or cDNA microarrays) comprising all of the polynucleotides and polypeptides in the Tables 3-5, or combinations thereof, of the predictor gene sets described herein that have been demonstrated to be most highly correlated with sensitivity (or resistance) to src or src family tyrosine kinases modulators, particularly inhibitors of src tyrosine kinase. Preferably, the predictor gene sets are common for predicting sensitivity among more than one src kinase modulator, e.g. a src kinase inhibitor, as demonstrated herein. In accordance with this aspect of the invention, the oligonucleotide sequences or cDNA sequences include any of the predictor polynucleotides and polypeptides or gene combinations as described herein, which are highly expressed in resistant or sensitive cells, and are contained on a microarray, e.g., a oligonucleotide microarray or cDNA microarray in association with, or introduced onto, any supporting materials, such as glass slides, nylon membrane filters, glass or polymer beads, or other types of suitable substrate material.

[0107] Cellular nucleic acid, e.g., RNA, is isolated either from cells undergoing testing after exposure to a drug or compound that interacts with src tyrosine kinase, or its signaling pathway, or from cells being tested to obtain an initial determination or prediction of cells' sensitivity to the drug or compound, and, ultimately, a prediction of treatment outcome with the drug or compound. The isolated nucleic acid is appropriately labeled and applied to one or more of the specialized microarrays. The resulting pattern of gene expression on the specialized microarray is analyzed as described herein and known in the art. A pattern of gene expression correlating with either sensitivity or resistance to the drug or compound is able to be determined, e.g., via comparison with the gene expression patterns as shown in FIGS. 1-3 for the panel of cells exposed to the src kinase inhibitors assayed herein.

[0108] In accordance with the specialized microarray embodiment of this invention, the microarray contains the polynucleotides and polypeptides of one or more of the predictor gene sets, or a combination thereof, or all of the gene in the Tables 3-5, that are highly correlated with drug sensitivity or resistance by a cell type. (See, for example, Table 1 for colon cells). If the nucleic acid target isolated from test cells, such as tumor or cancer cells, preferably colon cancer or tumor cells, shows a high level of detectable binding to the polynucleotides and polypeptides of the predictor set for drug sensitivity relative to control, then it can be predicted that a patient's cells will respond to the drug, or a series of drugs, and that the patient's response to the drug, or a series of drugs, will be favorable.

[0109] Such a result predicts that the cells of a tumor or cancer are good candidates for the successful treatment or therapy utilizing the drug, or series of drugs. Alternatively, if the nucleic acid target isolated from test cells shows a high level of detectable binding to the polynucleotides and polypeptides of the predictor set for drug resistance, relative to control, then it can be predicted that a patient is likely not to respond to the drug, or a series of drugs, and that the patient's response to the drug, or a series of drugs, is not likely to be favorable. Such a result predicts that the cells of a tumor or cancer are not good candidates for treatment or therapy utilizing the drug, or series of drugs.

[0110] The utilization of microarray technology is known practiced in the art. Briefly, to determine gene expression using microarray technology, polynucleotides, e.g., RNA, DNA, cDNA, preferably RNA, are isolated from a biological sample, e.g., cells, as described herein for colon cells. The isolated nucleic acid is detectably labeled, e.g., fluorescent, enzyme, or chemiluminescent label, and applied to a microarray, e.g., the specialized microarrays provided by this invention. The array is then washed to remove unbound material and visualized by staining or fluorescence, or other means known in the art depending on the type of label utilized.

[0111] In another embodiment of this invention, the predictor gene sets, or subsets of polynucleotides and polypeptides comprising the predictor gene sets, can be used as biomarkers for cells that are resistant or sensitive to src kinase inhibitor compounds. With the predictor polynucleotides and polypeptides in hand, screening and detection assays can be carried out to determine whether or not a given compound, preferably a src kinase inhibitor compound, elicits a sensitive or a resistant phenotype following exposure of cells, e.g., a tumor or cancer biopsy sample, such as a colon cancer cell sample, to the compound. Thus, methods of screening, monitoring, detecting, and/or diagnosing to determine the resistance or sensitivity of cells to a drug or compound that interacts with src tyrosine kinase, or the src kinase pathway, preferably an inhibitor compound, and to which the cells are exposed, are encompassed by the present invention.

[0112] Such methods embrace a variety of methods and assays to determine and assess the expression of polynucleotides and polypeptides, in particular, the predictor or src biomarker polynucleotides and polypeptides as described herein (Tables 3-6), in cells that have been exposed to drugs or compounds that interact with or effect a protein tyrosine kinase, or a protein tyrosine kinase pathway, wherein the protein tyrosine kinases include members of the Src family of tyrosine kinases, for example, Src, Fgr, Fyn, Yes, Blk, Hck, Lck and Lyn, as well as other protein tyrosine kinases, including, Bcr-abl, Jak, PDGFR, c-kit and Ephr. Suitable methods include detection and evaluation of gene activation or expression at the level of nucleic acid, e.g., DNA, RNA, mRNA, and detection and evaluation of encoded protein. For example, PCR assays as known and practiced in the art can be employed to quantify RNA in cells being assayed for susceptibility to drug treatment, for example, src kinase inhibitors. (see Example 2, RT-PCR).

[0113] In another embodiment, the present invention is directed to a method of identifying cells, tissues, and/or patients that are predicted to be resistant to either protein tyrosine inhibitor compounds or compounds that affect protein tyrosine kinase signaling pathways, e.g., Src tyrosine kinase, or that are resistant in different biological systems to those compounds. The method comprises the step(s) of (i) analyzing the expression of only those polynucleotides and polypeptides listed in Tables 3 thru 6, or any combination thereof, that have been shown to be correlative to predicting resistant responses to such compounds; (ii) comparing the observed expression levels of those correlative resistant polynucleotides and polypeptides in the test cells, tissues, and/or patients to the expression levels of those same polynucleotides and polypeptides in a cell line that is known to be resistant to the compounds; and (iii) predicting whether the cells, tissues, and/or patients are resistant to the compounds based upon the overall similarity of the observed expression of those polynucleotides and polypeptides in step (ii).

[0114] In another embodiment, the present invention is directed to a method of identifying cells, tissues, and/or patients that are predicted to be sensitive to either protein tyrosine inhibitor compounds or compounds that affect protein tyrosine kinase signaling pathways, e.g., the Src tyrosine kinase, or that are sensitive in different biological systems to those compounds. The method involves the step(s) of (i) analyzing the expression of only those polynucleotides and polypeptides listed in Tables 3 thru 6, or any combination thereof, that have been shown to be correlative to predicting sensitive responses to such compounds; (ii) comparing the observed expression levels of those correlative sensitive polynucleotides and polypeptides in the test cells, tissues, and/or patients to the expression levels of those same polynucleotides and polypeptides in a cell line that is known to be sensitive to the compounds; and (iii) predicting whether the cells, tissues, and/or patients are sensitive to the compounds based upon the overall similarity of the observed expression of those polynucleotides and polypeptides in step (ii).

[0115] The present invention further encompasses the detection and/or quantification of one or more of the protein tyrosine kinase biomarker proteins of the present invention using antibody-based assays (e.g., immunoassays) and/or detection systems. As mentioned herein, protein tyrosine kinase biomarkers encompass members of the Src family of tyrosine kinases, for example, Src, Fgr, Fyn, Yes, Blk Hck, Lck and Lyn, as well as other protein tyrosine kinases, including, Bcr-abl, Jak, PDGFR, c-kit and Ephr. Such assays include the following non-limiting examples, ELISA, immunofluorescence, FACS, Western Blots, etc., as further described herein.

[0116] In another embodiment, the human protein tyrosine kinase biomarker polypeptides and/or peptides of the present invention, or immunogenic fragments or oligopeptides thereof, can be used for screening therapeutic drugs or compounds in a variety of drug screening techniques. The fragment employed in such a screening assay can be free in solution, affixed to a solid support, borne on a cell surface, or located intracellularly. The reduction or abolition of activity of the formation of binding complexes between the biomarker protein and the agent being tested can be measured. Thus, the present invention provides a method for screening or assessing a plurality of compounds for their specific binding affinity with a protein kinase biomarker polypeptide, or a bindable peptide fragment thereof, of this invention. The method comprises the steps of providing a plurality of compounds; combining the protein kinase biomarker polypeptide, or a bindable peptide fragment thereof, with each of the plurality of compounds, for a time sufficient to allow binding under suitable conditions; and detecting binding of the biomarker polypeptide or peptide to each of the plurality of test compounds, thereby identifying the compounds that specifically bind to the biomarker polypeptide or peptide. More specifically, the biomarker polypeptide or peptide is that of a Src tyrosine kinase.

[0117] Methods of identifying compounds that modulate the activity of the human protein tyrosine kinase biomarker polypeptides and/or peptides are provided by the present invention and comprise combining a potential or candidate compound or drug modulator of protein kinase biological activity with an protein kinase biomarker polypeptide or peptide, for example, the Src tyrosine kinase biomarker amino acid sequences as set forth in Table 2, and measuring an effect of the candidate compound or drug modulator on the biological activity of the protein kinase biomarker polypeptide or peptide. Such measurable effects include, for example, a physical binding interaction; the ability to cleave a suitable protein kinase substrate; effects on a native and cloned protein kinase biomarker-expressing cell line; and effects of modulators or other protein kinase-mediated physiological measures.

[0118] Another method of identifying compounds that modulate the biological activity of the novel protein tyrosine kinase biomarker polypeptides of the present invention comprises combining a potential or candidate compound or drug modulator of a protein tyrosine kinase biological activity, e.g., a Src tyrosine kinase, with a host cell that expresses the protein tyrosine kinase biomarker polypeptide and measuring an effect of the candidate compound or drug modulator on the biological activity of the protein tyrosine kinase biomarker polypeptide. The host cell can also be capable of being induced to express the protein tyrosine kinase biomarker polypeptide, e.g., via inducible expression. Physiological effects of a given modulator candidate on the protein tyrosine kinase biomarker polypeptide can also be measured. Thus, cellular assays for particular protein tyrosine kinase modulators, e.g., a src kinase modulator, can be either direct measurement or quantification of the physical biological activity of the protein tyrosine kinase biomarker polypeptide, or they may be measurement or quantification of a physiological effect. Such methods preferably employ a protein tyrosine kinase biomarker polypeptide as described herein, or an overexpressed recombinant protein tyrosine kinase biomarker polypeptide in suitable host cells containing an expression vector as described herein, wherein the protein tyrosine kinase biomarker polypeptide is expressed, overexpressed, or undergoes up-regulated expression.

[0119] Another aspect of the present invention embraces a method of screening for a compound that is capable of modulating the biological activity of a protein tyrosine kinase biomarker polypeptide, e.g., a Src kinase biomarker polypeptide. The method comprises providing a host cell containing an expression vector harboring a nucleic acid sequence encoding a protein tyrosine kinase biomarker polypeptide, or a functional peptide or portion thereof (e.g., the src polypeptide, protein, peptide, or fragment sequences as set forth in Tables 3 thru 12, or the Sequence Listing herein); determining the biological activity of the expressed protein tyrosine kinase biomarker polypeptide in the absence of a modulator compound; contacting the cell with the modulator compound and determining the biological activity of the expressed protein tyrosine kinase biomarker polypeptide in the presence of the modulator compound. In such a method, a difference between the activity of the protein tyrosine kinase biomarker polypeptide in the presence of the modulator compound and in the absence of the modulator compound indicates a modulating effect of the compound.

[0120] Essentially any chemical compound can be employed as a potential modulator or ligand in the assays according to the present invention. Compounds tested as protein tyrosine kinase modulators can be any small chemical compound, or biological entity (e.g., protein, sugar, nucleic acid, or lipid). Test compounds are typically small chemical molecules and peptides. Generally, the compounds used as potential modulators can be dissolved in aqueous or organic (e.g., DMSO-based) solutions. The assays are designed to screen large chemical libraries by automating the assay steps and providing compounds from any convenient source. Assays are typically run in parallel, for example, in microtiter formats on microtiter plates in robotic assays. There are many suppliers of chemical compounds, including, for example, Sigma (St. Louis, Mo.), Aldrich (St. Louis, Mo.), Sigma-Aldrich (St. Louis, MO), Fluka Chemika-Biochemica Analytika (Buchs, Switzerland). Also, compounds can be synthesized by methods known in the art.

[0121] High throughput screening methodologies are particularly envisioned for the detection of modulators of the novel protein tyrosine kinase biomarker, e.g., src biomarker, polynucleotides and polypeptides described herein. Such high throughput screening methods typically involve providing a combinatorial chemical or peptide library containing a large number of potential therapeutic compounds (e.g., ligand or modulator compounds). The combinatorial chemical libraries or ligand libraries are then screened in one or more assays to identify those library members (e.g., particular chemical species or subclasses) that display a desired characteristic activity. The compounds so identified can serve as conventional lead compounds, or can themselves be used as potential or actual therapeutics.

[0122] A combinatorial chemical library is a collection of diverse chemical compounds generated either by chemical synthesis or biological synthesis, prepared by combining a number of chemical building blocks (i.e., reagents such as amino acids). As an example, a linear combinatorial library, e.g., a polypeptide or peptide library, is formed by combining a set of chemical building blocks in every possible way for a given compound length (i.e., the number of amino acids in a polypeptide or peptide compound). Millions of chemical compounds can be synthesized through such combinatorial mixing of chemical building blocks.

[0123] The preparation and screening of combinatorial chemical libraries is well known to those having skill in the pertinent art. Combinatorial libraries include, without limitation, peptide libraries (e.g. U.S. Pat. No. 5,010,175; Furka, 1991, Int. J. Pept. Prot. Res., 37:487-493; and Houghton et al., 1991, Nature, 354:84-88). Other chemistries for generating chemical diversity libraries can also be used. Nonlimiting examples of chemical diversity library chemistries include, peptoids (PCT Publication No. WO 91/019735), encoded peptides (PCT Publication No. WO 93/20242), random bio-oligomers (PCT Publication No. WO 92/00091), benzodiazepines (U.S. Pat. No. 5,288,514), diversomers such as hydantoins, benzodiazepines and dipeptides (Hobbs et al., 1993, Proc. Natl. Acad. Sci. USA, 90:6909-6913), vinylogous polypeptides (Hagihara et al., 1992, J. Amer. Chem. Soc., 114:6568), nonpeptidal peptidomimetics with glucose scaffolding (Hirschmann et al., 1992, J. Amer. Chem. Soc., 114:9217-9218), analogous organic synthesis of small compound libraries (Chen et al., 1994, J. Amer. Chem. Soc., 116:2661), oligocarbamates (Cho et al., 1993, Science, 261:1303), and/or peptidyl phosphonates (Campbell et al., 1994, J. Org. Chem., 59:658), nucleic acid libraries (see Ausubel, Berger and Sambrook, all supra), peptide nucleic acid libraries (U.S. Pat. No. 5,539,083), antibody libraries (e.g., Vaughn et al., 1996, Nature Biotechnology, 14(3):309-314) and PCT/US96/10287), carbohydrate libraries (e.g., Liang et al., 1996, Science, 274-1520-1522) and U.S. Pat. No. 5,593,853), small organic molecule libraries (e.g., benzodiazepines, Baum C&EN, Jan. 18, 1993, page 33; and U.S. Pat. No. 5,288,514; isoprenoids (U.S. Pat. No. 5,569,588); thiazolidinones and metathiazanones (U.S. Pat. No. 5,549,974); pyrrolidines (U.S. Pat. Nos. 5,525,735 and 5,519,134); morpholino compounds (U.S. Pat. No. 5,506,337); and the like.

[0124] Devices for the preparation of combinatorial libraries are commercially available (e.g., 357 MPS, 390 MPS, Advanced Chem Tech, Louisville Ky.; Symphony, Rainin, Woburn, Mass.; 433A Applied Biosystems, Foster City, Calif.; 9050 Plus, Millipore, Bedford, Mass.). In addition, a large number of combinatorial libraries are commercially available (e.g., ComGenex, Princeton, N.J.; Asinex, Moscow, Russia; Tripos, Inc., St. Louis, Mo.; ChemStar, Ltd., Moscow, Russia; 3D Pharmaceuticals, Exton, Pa.; Martek Biosciences, Columbia, Md., and the like).

[0125] In one aspect, the invention provides solid phase-based in vitro assays in a high throughput format, where the cell or tissue expressing a tyrosine kinase protein/polypeptide/peptide is attached to a solid phase substrate. In such high throughput assays, it is possible to screen up to several thousand different modulators or ligands in a single day. In particular, each well of a microtiter plate can be used to perform a separate assay against a selected potential modulator, or, if concentration or incubation time effects are to be observed, every 5-10 wells can be used to test a single modulator. Thus, a single standard microtiter plate can be used in to assay about 96 modulators. If 1536 well plates are used, then a single plate can easily assay from about 100 to about 1500 different compounds. It is possible to assay several different plates per day; thus, for example, assay screens for up to about 6,000-20,000 different compounds are possible using the described integrated systems.

[0126] In another of its aspects, the present invention encompasses screening and small molecule (e.g., drug) detection assays which involve the detection or identification of small molecules that can bind to a given protein, i.e., a tyrosine kinase biomarker polypeptide or peptide, such as a Src tyrosine kinase biomarker polypeptide or peptide. Particularly preferred are assays suitable for high throughput screening methodologies.

[0127] In such binding-based detection, identification, or screening assays, a functional assay is not typically required. All that is needed, in general, is a target protein, preferably substantially purified, and a library or panel of compounds (e.g., ligands, drugs, or small molecules), or biological entities to be screened or assayed for binding to the protein target. Preferably, most small molecules that bind to the target protein modulate the target's activity in some manner due to preferential, higher affinity binding to functional areas or sites on the protein.

[0128] An example of such an assay is the fluorescence based thermal shift assay (3-Dimensional Pharmaceuticals, Inc., 3DP, Exton, Pa.) as described in U.S. Pat. Nos. 6,020,141 and 6,036,920 to Pantoliano et al. (See also, J. Zimmerman, 2000, Gen. Eng. News, 20(8)). The assay allows the detection of small molecules (e.g., drugs, ligands) that bind to expressed, and preferably purified, tyrosine kinase biomarker proteins/polypeptides/peptides, such as the Src tyrosine kinase, based on affinity of binding determinations by analyzing thermal unfolding curves of protein-drug or ligand complexes. The drugs or binding molecules determined by this technique can be further assayed, if desired, by methods such as those described herein to determine if the molecules affect or modulate function or activity of the target protein.

[0129] To purify a tyrosine kinase biomarker polypeptide or peptide, e.g., Src tyrosine kinase, to measure a biological binding or ligand binding activity, the source may be a whole cell lysate that can be prepared by successive freeze-thaw cycles (e.g., one to three) in the presence of standard protease inhibitors. The tyrosine kinase biomarker polypeptide can be partially or completely purified by standard protein purification methods, e.g., affinity chromatography using specific antibody(ies) described herein, or by ligands specific for an epitope tag engineered into the recombinant tyrosine kinase biomarker polypeptide molecule, also as described herein. Binding activity can then be measured as described.

[0130] Compounds which are identified according to the methods provided herein, and which modulate or regulate the biological activity or physiology of the tyrosine kinase biomarker polypeptides according to the present invention, are a preferred embodiment of this invention. It is contemplated that such modulatory compounds can be employed in treatment and therapeutic methods for treating a condition that is mediated by the tyrosine kinase biomarker polypeptides, e.g., Src tyrosine kinase biomarker polypeptides, by administering to an individual in need of such treatment a therapeutically effective amount of the compound identified by the methods described herein.

[0131] In addition, the present invention provides methods for treating an individual in need of such treatment for a disease, disorder, or condition that is mediated by the tyrosine kinase biomarker polypeptides of the invention, comprising administering to the individual a therapeutically effective amount of the tyrosine kinase biomarker-modulating compound identified by a method provided herein. In accordance with this invention, the tyrosine kinase biomarker polypeptides or proteins encompassed by the methods include members of the Src family of tyrosine kinases, for example, Src, Fgr, Fyn, Yes, Blk, Hck, Lck and Lyn, as well as other protein tyrosine kinases, including, Bcr-abl, Jak, PDGFR, c-kit and Ephr.

[0132] The present invention particularly provides methods for treating an individual in need of such treatment for a disease, disorder, or condition that is mediated by Src biomarker polypeptides of the invention, comprising administering to the individual a therapeutically effective amount of the Src biomarker-modulating compound identified by a method provided herein.

[0133] Antibodies directed against the src biomarker proteins of the present invention, or antigenic or immunogenic epitopes thereof, can be, for example, polyclonal or monoclonal antibodies. The present invention also includes chimeric, single chain, and humanized antibodies, as well as Fab, F(ab′)₂, or Fv fragments, or the product of an Fab expression library. Various procedures known in the art may be used for the production of such antibodies and antibody fragments.

[0134] Antibodies generated against the polypeptides or peptides corresponding to one or more of the src biomarker sequences of the present invention can be obtained by direct injection of the polypeptides or peptides into an animal, or by administering the polypeptides or peptides to an animal, preferably a nonhuman animal. The antibodies so obtained will then bind to the polypeptides or peptides. In this manner, even a sequence encoding only a fragment of a polypeptide can be used to generate antibodies binding to the whole native polypeptide. Such antibodies can be used, for example, to isolate the polypeptide from tissue expressing that polypeptide.

[0135] For the preparation of monoclonal antibodies, any technique which provides antibodies produced by continuous cell line cultures can be used. Examples include the hybridoma technique (Kohler and Milstein, 1975, Nature, 256:495497), the trioma technique, the human B-cell hybridoma technique (Kozbor et al., 1983, Immunol. Today, 4:72), and the EBV-hybridoma technique to produce human monoclonal antibodies (Cole et al., 1985. In: Monoclonal Antibodies and Cancer Therapy, Alan R. Liss, Inc., pp. 77-96).

[0136] Techniques described for the production of single chain antibodies (U.S. Pat. No. 4,946,778) can be adapted to produce single chain antibodies to immunogenic polypeptide products of this invention. Also, transgenic mice may be used to express humanized antibodies to immunogenic polypeptide products of this invention.

[0137] An ELISA assay initially involves preparing an antibody specific to antigens of the src biomarker proteins or polypeptides, preferably a monoclonal antibody. In addition, a reporter antibody is used which recognizes and binds to the monoclonal antibody. To the reporter antibody is attached a detectable reagent such as a radioactive isotope, a fluorescent moiety, or, in this example, an enzyme, such as horseradish peroxidase.

[0138] To carry out the ELISA assay, a sample is removed from a host, e.g., a patient sample, and incubated on a solid support, e.g., wells of a microtiter plate, or a polystyrene dish, to which the proteins in the sample can bind. Any free protein binding sites on the dish are then blocked by incubating with a non-specific protein such as bovine serum albumin. The monoclonal antibody is then added to the solid support, e.g., the wells or the dish, and allowed to incubate. During the incubation time, the monoclonal antibodies attach to any src biomarker proteins or polypeptides that have attached to the polystyrene dish. All unbound monoclonal antibody is washed away using an appropriate buffer solution. The reporter antibody, e.g., linked to horseradish peroxidase, is added to the support, thereby resulting in the binding of the reporter antibody to any monoclonal antibody which has bound to src biomarker proteins or polypeptides that are present in the sample. Unattached reporter antibody is then washed away. Peroxidase substrate is added to the support and the amount of color developed in a given time period provides a measurement of the amount of src biomarker proteins or polypeptides that are present in a given volume of patient sample when compared against a standard curve.

[0139] The present invention encompasses polypeptides comprising, or alternatively, consisting of, an epitope of the polypeptide having an amino acid sequence of one or more of the src biomarker amino acid sequences as set forth in Tables 3-6. The present invention further encompasses polynucleotide sequences encoding an epitope of a polypeptide sequence of src biomarkers of the invention.

[0140] The term “epitopes” as used herein, refers to portions of a polypeptide having antigenic or immunogenic activity in an animal, preferably a mammal, and most preferably a human. In a preferred embodiment, the present invention encompasses a polypeptide comprising an epitope, as well as the polynucleotide encoding this polypeptide. An “immunogenic epitope” as used herein, refers to a portion of a protein that elicits an antibody response in an animal, as determined by any method known in the art, for example, by the methods for generating antibodies described infra. (See, for example, Geysen et al., 1983, Proc. Natl, Acad. Sci. USA, 81:3998-4002). The term “antigenic epitope” as used herein refers to a portion of a protein to which an antibody can immunospecifically bind to its antigen as determined by any method well known in the art, for example, by the immunoassays described herein. Immunospecific binding excludes non-specific binding, but does not necessarily exclude cross-reactivity with other antigens. Antigenic epitopes need not necessarily be immunogenic. Either the full-length protein or an antigenic peptide fragment can be used. Antibodies are preferably prepared from these regions or from discrete fragments in regions of the src biomarker nucleic acid and protein sequences comprising an epitope.

[0141] Moreover, antibodies can also be prepared from any region of the polypeptides and peptides of the src biomarkers as described herein. A preferred fragment generates the production of an antibody that diminishes or completely prevents ligand binding. In addition, antibodies can be developed against an entire receptor or portions of the receptor, for example, the intracellular carboxy terminal domain, the amino terminal extracellular domain, the entire transmembrane domain, specific transmembrane segments, any of the intracellular or extracellular loops, or any portions of these regions. Antibodies can also be developed against specific functional sites, such as the site of ligand binding, or sites that are glycosylated, phosphorylated, myristylated, or amidated, for example.

[0142] Polypeptide or peptide fragments that function as epitopes may be produced by any conventional means. (See, e.g., Houghten, 1985, Proc. Natl. Acad. Sci. USA, 82:5131-5135; and as described in U.S. Pat. No. 4,631,211).

[0143] In the present invention, antigenic epitopes preferably contain a sequence of at least 4, at least 5, at least 6, at least 7, more preferably at least 8, at least 9, at least 10, at least 11, at least 12, at least 13, at least 14, at least 15, at least 20, at least 25, at least 30, at least 40, at least 50, and, most preferably, between about 15 to about 30 amino acids. Preferred polypeptides comprising immunogenic or antigenic epitopes are at least 10, 15, 20, 25, 30, 35, 40, 45, 50, 55, 60, 65, 70, 75, 80, 85, 90, 95, or 100 amino acid residues in length. Additional non-exclusive preferred antigenic epitopes include the antigenic epitopes disclosed herein, as well as portions thereof, as well as any combination of two, three, four, five or more of these antigenic epitopes. Antigenic epitopes are useful, for example, to raise antibodies, including monoclonal antibodies, that specifically bind the epitope. In addition, antigenic epitopes can be used as the target molecules in immunoassays. (See, for instance, Wilson et al., 1984, Cell, 37:767-778; and Sutcliffe et al., 1983, Science, 219:660-666). Such fragments as described herein are not to be construed, however, as encompassing any fragments which may be disclosed prior to the invention.

[0144] Similarly, immunogenic epitopes can be used, for example, to induce antibodies according to methods well known in the art. (See, for instance, Sutcliffe et al., supra; Wilson et al., supra; Chow et al., 1985, Proc. Natl. Acad. Sci. USA, 82:910-914; and Bittle et al., 1985, J. Gen. Virol., 66:2347-2354). Preferred immunogenic epitopes include the immunogenic epitopes disclosed herein, as well as any combination of two, three, four, five or more of these immunogenic epitopes.

[0145] Src biomarker polypeptides comprising one or more immunogenic epitopes which elicit an antibody response can be introduction together with a carrier protein, such as an albumin, to an animal system (such as rabbit or mouse). Alternatively, if the polypeptide is of sufficient length (e.g., at least about 25 amino acids), the polypeptide can be presented without a carrier. However, immunogenic epitopes comprising as few as 5 to 10 amino acids have been shown to be sufficient to raise antibodies capable of binding to, at the very least, linear epitopes in a denatured polypeptide (e.g., in Western blotting).

[0146] Epitope-bearing polypeptides of the present invention may be used to induce antibodies according to methods well known in the art including, but not limited to, in vivo immunization, in vitro immunization, and phage display methods. See, e.g., Sutcliffe et al., supra; Wilson et al., supra; and Bittle et al., supra). If in vivo immunization is used, animals can be immunized with free peptide; however, the anti-peptide antibody titer may be boosted by coupling the peptide to a macromolecular carrier, such as keyhole limpet hemacyanin (KLH), or tetanus toxoid (IT). For instance, peptides containing cysteine residues can be coupled to a carrier using a linker such as maleimidobenzoyl-N-hydroxysuccinimide ester (MBS), while other peptides may be coupled to carriers using a more general linking agent, such as glutaraldehyde.

[0147] Epitope bearing peptides of the invention may also be synthesized as multiple antigen peptides (MAPs), first described by J. P. Tam et al., 1995, Biomed. Pept., Proteins, Nucleic Acids, 199, 1(3):123-32; and Calvo, et al., 1993, J. Immunol., 150(4):1403-12), which are hereby incorporated by reference in their entirety herein. MAPs contain multiple copies of a specific peptide attached to a non-immunogenic lysine core. MAP peptides usually contain four or eight copies of the peptide, which are often referred to as MAP4 or MAP8 peptides. By way of non-limiting example, MAPs can be synthesized onto a lysine core matrix attached to a polyethylene glycol-polystyrene (PEG-PS) support. The peptide of interest is synthesized onto the lysine residues using 9-fluorenylmethoxycarbonyl (Fmoc) chemistry. For example, Applied Biosystems (Foster City, Calif.) offers commercially available MAP resins, such as, for example, the Fmoc Resin 4 Branch and the Fmoc Resin 8 Branch which can be used to synthesize MAPs. Cleavage of MAPs from the resin is performed with standard trifloroacetic acid (TFA)-based cocktails known in the art. Purification of MAPs, except for desalting, is not generally necessary. MAP peptides can be used in immunizing vaccines which elicit antibodies that recognize both the MAP and the native protein from which the peptide was derived.

[0148] Epitope-bearing peptides of the invention can also be incorporated into a coat protein of a virus, which can then be used as an immunogen or a vaccine with which to immunize animals, including humans, in order stimulate the production of anti-epitope antibodies. For example, the V3 loop of the gp120 glycoprotein of the human immunodeficiency virus type 1 (HIV-1) has been engineered to be expressed on the surface of rhinovirus. Immunization with rhinovirus displaying the V3 loop peptide yielded apparently effective mimics of the HIV-1 immunogens (as measured by their ability to be neutralized by anti-HIV-1 antibodies as well as by their ability to elicit the production of antibodies capable of neutralizing HIV-1 in cell culture). This techniques of using engineered viral particles as immunogens is described in more detail in Smith et al., 1997, Behring Inst Mitt Feb, (98):229-39; Smith et al., 1998, J. Virol., 72:651-659; and Zhang et al., 1999, Biol. Chem., 380:365-74), which are hereby incorporated by reference herein in their entireties.

[0149] Epitope bearing polypeptides of the invention can be modified, for example, by the addition of amino acids at the amino- and/or carboxy-terminus of the peptide. Such modifications are performed, for example, to alter the conformation of the epitope bearing polypeptide such that the epitope will have a conformation more closely related to the structure of the epitope in the native protein. An example of a modified epitope-bearing polypeptide of the invention is a polypeptide in which one or more cysteine residues have been added to the polypeptide to allow for the formation of a disulfide bond between two cysteines, thus resulting in a stable loop structure of the epitope-bearing polypeptide under non-reducing conditions. Disulfide bonds can form between a cysteine residue added to the polypeptide and a cysteine residue of the naturally-occurring epitope, or between two cysteines which have both been added to the naturally-occurring epitope-bearing polypeptide.

[0150] In addition, it is possible to modify one or more amino acid residues of the naturally-occurring epitope-bearing polypeptide by substitution with cysteines to promote the formation of disulfide bonded loop structures. Cyclic thioether molecules of synthetic peptides can be routinely generated using techniques known in the art, e.g., as described in PCT publication WO 97/46251, incorporated in its entirety by reference herein. Other modifications of epitope-bearing polypeptides contemplated by this invention include biotinylation.

[0151] For the production of antibodies in vivo, host animals, such as rabbits, rats, mice, sheep, or goats, are immunized with either free or carrier-coupled peptides or MAP peptides, for example, by intraperitoneal and/or intradermal injection. Injection material is typically an emulsion containing about 100 μg of peptide or carrier protein and Freund's adjuvant, or any other adjuvant known for stimulating an immune response. Several booster injections may be needed, for instance, at intervals of about two weeks, to provide a useful titer of anti-peptide antibody which can be detected, for example, by ELISA assay using free peptide adsorbed to a solid surface. The titer of anti-peptide antibodies in serum from an immunized animal can be increased by selection of anti-peptide antibodies, e.g., by adsorption of the peptide onto a solid support and elution of the selected antibodies according to methods well known in the art.

[0152] As one having skill in the art will appreciate, and as discussed above, the src biomarker polypeptides of the present invention, which include the following: e.g., members of the Src family of tyrosine kinases, such as Src, Fgr, Fyn, Yes, Blk, Hck, Lck and Lyn, as well as other protein tyrosine kinases, including, Bcr-abl, Jak, PDGFR, c-kit and Ephr, which comprise an immunogenic or antigenic epitope, can be fused to other polypeptide sequences. For example, the polypeptides of the present invention can be fused with the constant domain of immunoglobulins (IgA, IgE, IgG, IgD, or IgM), or portions thereof, e.g., CH1, CH2, CH3, or any combination thereof, and portions thereof, or with albumin (including, but not limited to, recombinant human albumin, or fragments or variants thereof (see, e.g., U.S. Pat. No. 5,876,969; EP Patent No. 0 413 622; and U.S. Pat. No. 5,766,883, incorporated by reference in their entirety herein), thereby resulting in chimeric polypeptides. Such fusion proteins may facilitate purification and may increase half-life in vivo. This has been shown for chimeric proteins containing the first two domains of the human CD4-polypeptide and various domains of the constant regions of the heavy or light chains of mammalian immununoglobulins. See, e.g., Traunecker et al., 1988, Nature, 331:84-86).

[0153] Enhanced delivery of an antigen across the epithelial barrier to the immune system has been demonstrated for antigens (e.g., insulin) conjugated to an FcRn binding partner, such as IgG or Fc fragments (see, e.g., PCT Publications WO 96/22024 and WO 99/04813). IgG fusion proteins that have a disulfide-linked dimeric structure due to the IgG portion disulfide bonds have also been found to be more efficient in binding and neutralizing other molecules than are monomeric polypeptides, or fragments thereof, alone. See, e.g., Fountoulakis et al., 1995, J. Biochem., 270:3958-3964).

[0154] Nucleic acids encoding epitopes can also be recombined with a gene of interest as an epitope tag (e.g., the hemagglutinin (“HA”) tag or flag tag) to aid in detection and purification of the expressed polypeptide. For example, a system for the ready purification of non-denatured fusion proteins expressed in human cell lines has been described by Janknecht et al., (1991, Proc. Natl. Acad. Sci. USA, 88:8972-897). In this system, the gene of interest is subeloned into a vaccinia recombination plasmid such that the open reading frame of the gene is translationally fused to an amino-terminal tag having six histidine residues. The tag serves as a matrix binding domain for the fusion protein. Extracts from cells infected with the recombinant vaccinia virus are loaded onto an Ni²⁺ nitriloacetic acid-agarose column and histidine-tagged proteins are selectively eluted with imidazole-containing buffers.

[0155] Additional fusion proteins of the invention can be generated by employing the techniques of gene-shuffling, motif-shuffling, exon-shuffling, and/or codon-shuffling (collectively referred to as “DNA shuffling”). DNA shuffling can be employed to modulate the activities of polypeptides of the invention, such methods can be used to generate polypeptides with altered activity, as well as agonists and antagonists of the polypeptides. See, generally, U.S. Pat. Nos. 5,605,793; 5,811,238; 5,830,721; 5,834,252; and 5,837,458, and Patten et al., 1997, Curr. Opinion Biotechnol., 8:724-33; Harayama, 1998, Trends Biotechnol., 16(2):76-82; Hansson, et al., 1999, J. Mol. Biol., 287:265-76; and Lorenzo and Blasco, 1998, Biotechniques, 24(2):308-313, the contents of each of which are hereby incorporated by reference in its entirety).

[0156] In an embodiment of the invention, alteration of polynucleotides corresponding to one or more of the src biomarker polynucleotide sequences as set forth in Tables 3-6, and the polypeptides encoded by these polynucleotides, can be achieved by DNA shuffling. DNA shuffling involves the assembly of two or more DNA segments by homologous or site-specific recombination to generate variation in the polynucleotide sequence. In another embodiment, polynucleotides of the invention, or their encoded polypeptides, may be altered by being subjected to random mutapolynucleotides and polypeptidesis by error-prone PCR, random nucleotide insertion, or other methods, prior to recombination. In another embodiment, one or more components, motifs, sections, parts, domains, fragments, etc., of a polynucleotide encoding a polypeptide of this invention may be recombined with one or more components, motifs, sections, parts, domains, fragments, etc., of one or more heterologous molecules.

[0157] Another aspect of the present invention relates to antibodies and T-cell antigen receptors (TCRs), which immunospecifically bind to a polypeptide, polypeptide fragment, or variant one or more of the src biomarker amino acid sequences as set forth in Tables 3-6, and/or an epitope thereof, of the present invention (as determined by immunoassays well known in the art for assaying specific antibody-antigen binding).

[0158] The basic antibody structural unit of an antibody or immunoglobulin is known to comprise a tetramer. Each tetramer is composed of two identical pairs of polypeptide chains, each pair having one “light” (about 25 kDa) and one “heavy” chain (about 50-70 kDa). The amino terminal portion of each chain includes a variable region of about 100 to 110 or more amino acids; the variable region is primarily responsible for antigen recognition. The carboxy terminal portion of each chain defines a constant region that is primarily responsible for immunoglobulin effector function. Immunoglobulin light chains, including human light chains, are of the kappa and lambda types. Immunoglobulin heavy chain isotypes include IgM, IgD, IgG, IgA, and IgE. (See, generally, Fundamental Immunology, Ch. 7, Paul, W., Ed., 2nd Ed. Raven Press, N.Y. (1989), incorporated herein by reference in its entirety). The variable regions of each light/heavy chain pair form the antibody or immunoglobulin binding site. Thus, for example, an intact IgG antibody has two binding sites. Except in bifunctional or bispecific antibodies, the two binding sites are the same.

[0159] The chains of an immunoglobulin molecule exhibit the same general structure of relatively conserved framework regions (FR) joined by three hypervariable regions, also called complementarity determining regions or CDRs. The CDRs of the heavy and the light chains of each pair are aligned by the framework regions, thus enabling binding to a specific epitope. From N-terminus to C-terminus, both the light and heavy chains comprise the domains FR1, CDR1, FR2, CDR2, FR3, CDR3 and FR4. The assignment of amino acids to each domain is in accordance with the definitions of Kabat Sequences of Proteins of Immunological Interest (National Institutes of Health, Bethesda, Md. (1987 and 1991)); Chothia & Lesk, 1987, J. Mol. Biol., 196:901-917; or Chothia et al., 1989, Nature, 342:878-883.

[0160] A bispecific or bifunctional antibody is an artificial hybrid antibody having two different heavy/light chain pairs and two different binding sites. Bispecific antibodies can be produced by a variety of methods, including fusion of hybridomas or linking of Fab′ fragments. (See, e.g., Songsivilai & Lachmann, 1990, Clin. Exp. Immunol., 79:315-321; Kostelny et al., 1992, J. Immunol., 148:1547 1553). In addition, bispecific antibodies can be formed as “diabodies” (See, Holliger et al., 1993, Proc. Natl. Acad. Sci. USA, 90:6444-6448), or “Janusins” (See, Traunecker et al., 1991, EMBO J., 10:3655-3659 and Traunecker et al., 1992, Int. J. Cancer Suppl. 7:51-52-127).

[0161] Antibodies of the invention include, but are not limited to, polyclonal, monoclonal, multispecific, human, humanized or chimeric antibodies, single chain antibodies, Fab fragments, F(ab′) fragments, fragments produced by a Fab expression library, anti-idiotypic (anti-Id) antibodies (including, e.g., anti-Id antibodies to antibodies of the invention), intracellularly made antibodies (i.e., intrabodies), and epitope-binding fragments of any of the above. The term “antibody”, as used herein, refers to immunoglobulin molecules and immunologically active portions or fragments of immunoglobulin molecules, i.e., molecules that contain an antigen binding site that immunospecifically binds an antigen. The immunoglobulin molecules of the invention can be of any type (e.g., IgG, IgE, IgM, IgD, IgA and IgY), class or subclass (e.g., IgG1, IgG2, IgG3, IgG4, IgA1 and IgA2) of immunoglobulin molecule. In a preferred embodiment, the immunoglobulin is an IgG1 isotype. In another preferred embodiment, the immunoglobulin is an IgG2 isotype. In another preferred embodiment, the immunoglobulin is an IgG4 isotype.

[0162] Immunoglobulins may have both a heavy and a light chain. An array of IgG, IgE, IgM, IgD, IgA, and IgY heavy chains can be paired with a light chain of the kappa or lambda types. Most preferably, the antibodies of the present invention are human antigen-binding antibodies and antibody fragments and include, but are not limited to, Fab, Fab′ F(ab′)2, Fd, single-chain Fvs (scFv), single-chain antibodies, disulfide-linked Fvs (sdFv) and fragments comprising either a V_{L} or V_{H} domain. Antigen-binding antibody fragments, including single-chain antibodies, can comprise the variable region(s) alone or in combination with the entirety or a portion of the following: hinge region, and CH1, CH2, and CH3 domains. Also included in connection with the invention are antigen-binding fragments also comprising any combination of variable region(s) with a hinge region, and CH1, CH2, and CH3 domains. The antibodies of the invention may be from any animal origin including birds and mammals. Preferably, the antibodies are of human, murine (e.g., mouse and rat), donkey, sheep, rabbit, goat, guinea pig, camel, horse, or chicken origin. As used herein, “human” antibodies include antibodies having the amino acid sequence of a human immunoglobulin and include antibodies isolated from human immunoglobulin libraries or from animals transgenic for one or more human immunoglobulin and that do not express endogenous immunoglobulins, as described infra and, for example, in U.S. Pat. No. 5,939,598.

[0163] The antibodies of the present invention can be monospecific, bispecific, trispecific, or of greater multispecificity. Multispecific antibodies can be specific for different epitopes of a polypeptide of the present invention, or can be specific for both a polypeptide of the present invention, and a heterologous epitope, such as a heterologous polypeptide or solid support material. (See, e.g., PCT publications WO 93/17715; WO 92/08802; WO 91/00360; WO 92/05793; Tutt et al., 1991, J. Immunol., 147:60-69; U.S. Pat. Nos. 4,474,893; 4,714,681; 4,925,648; 5,573,920; 5,601,819; and Kostelny et al., 1992, J. Immunol., 148:1547-1553).

[0164] Antibodies of the present invention can be described or specified in terms of the epitope(s) or portion(s) of a polypeptide of the present invention which they recognize or specifically bind. The epitope(s) or polypeptide portion(s) can be specified, e.g., by N-terminal and C-terminal positions, by size in contiguous amino acid residues, or as presented in the sequences defined in Tables 3-6 herein. Further included in accordance with the present invention are antibodies which bind to polypeptides encoded by polynucleotides which hybridize to a polynucleotide of the present invention under stringent, or moderately stringent, hybridization conditions as described herein.

[0165] The antibodies of the invention (including molecules comprising, or alternatively consisting of, antibody fragments or variants thereof) can bind immunospecifically to a polypeptide or polypeptide fragment or variant human src biomarker protein as set forth in Tables 3-6 and/or monkey src biomarker protein.

[0166] By way of non-limiting example, an antibody can be considered to bind to a first antigen preferentially if it binds to the first antigen with a dissociation constant (Kd) that is less than the antibody's Kd for the second antigen. In another non-limiting embodiment, an antibody can be considered to bind to a first antigen preferentially if it binds to the first antigen with an affinity that is at least one order of magnitude less than the antibody's Ka for the second antigen. In another non-limiting embodiment, an antibody can be considered to bind to a first antigen preferentially if it binds to the first antigen with an affinity that is at least two orders of magnitude less than the antibody's Kd for the second antigen.

[0167] In another nonlimiting embodiment, an antibody may be considered to bind to a first antigen preferentially if it binds to the first antigen with an off rate (koff) that is less than the antibody's koff for the second antigen. In another nonlimiting embodiment, an antibody can be considered to bind to a first antigen preferentially if it binds to the first antigen with an affinity that is at least one order of magnitude less than the antibody's koff for the second antigen. In another nonlimiting embodiment, an antibody can be considered to bind to a first antigen preferentially if it binds to the first antigen with an affinity that is at least two orders of magnitude less than the antibody's koff for the second antigen.

[0168] Antibodies of the present invention can also be described or specified in terms of their binding affinity to a src biomarker polypeptide of the present invention, e.g., members of the Src family of tyrosine kinases, for example, Src, Fgr, Fyn, Yes, Blk, Hck, Lck and Lyn, as well as other protein tyrosine kinases, including, Bcr-abl, Jak, PDGFR, c-kit and Ephr. Preferred binding affinities include those with a dissociation constant or Kd of less than 5×10⁻² M, 1×10⁻² M, 5×10⁻³ M, 1×10⁻³ M, 5×10⁻⁴ M, or 1×10⁻⁴ M. More preferred binding affinities include those with a dissociation constant or Kd less than 5×10⁻⁵M, 1×10⁻⁵M, 5×10⁻⁶M, 1×10⁻⁶M, 5×10⁻⁴ M, 1×10⁻⁷ M, 5×10⁻⁸ M, or 1×10⁻⁴ M. Even more preferred antibody binding affinities include those with a dissociation constant or Kd of less than 5×10⁻⁹ M, 1×10⁻⁹ M, 5×10⁻¹⁰ M, 1×10⁻¹⁰ M, 5×10⁻¹¹ M, 1×10⁻¹¹ M, 5×10⁻¹² M, 1×10⁻¹² M, 5×10⁻¹³ M, 1×10⁻¹³ M, 5×10⁻¹⁴ M, 1×10⁻¹⁴ M, 5×10⁻¹⁵ M, or 1×10⁻¹⁵ M.

[0169] In specific embodiments, antibodies of the invention bind to src biomarker polypeptides, or fragments, or variants thereof, with an off rate (koff) of less than or equal to about 5×10⁻² sec⁻¹, 1×10⁻² sec⁻¹, 5×10⁻³ sec⁻¹, or 1×10⁻³ sec⁻¹. More preferably, antibodies of the invention bind to src biomarker protein polypeptides or fragments or variants thereof with an off rate (koff) of less than or equal to about 5×10⁻⁴ sec⁻¹, 1×10⁻⁴ sec⁻¹, 5×10⁻⁵ sec⁻¹, 1×10⁻⁵ sec⁻¹, 5×10⁻⁶ sec⁻¹, 1×10⁻⁶ sec⁻¹, 5×10⁻⁷ sec⁻¹, or 1×10⁻⁷ sec⁻¹.

[0170] In other embodiments, antibodies of the invention bind to src biomarker polypeptides or fragments or variants thereof with an on rate (kon) of greater than or equal to 1×10³ M⁻¹ sec⁻¹, 5×10³ M⁻¹ sec⁻¹, 1×10⁴ M⁻¹ sec⁻¹, or 5×10⁴ M⁻¹ sec⁻¹. More preferably, antibodies of the invention bind to src biomarker polypeptides or fragments or variants thereof with an on rate greater than or equal to 1×10⁵ M⁻¹ sec⁻¹, 5×10⁵ M⁻¹ sec⁻¹, 1×10⁶ M⁻¹ sec⁻¹, 5×10⁻⁶ M sec⁻¹, or 1×10−7 M⁻¹ sec⁻¹.

[0171] The present invention also provides antibodies that competitively inhibit the binding of an antibody to an epitope of the invention as determined by any method known in the art for determining competitive binding, for example, the immunoassays as described herein. In preferred embodiments, the antibody competitively inhibits binding to an epitope by at least 95%, at least 90%, at least 85%, at least 80%, at least 75%, at least 70%, at least 60%, or at least 50%.

[0172] Antibodies of the present invention may act as agonists or antagonists of the src biomarker polypeptides of the present invention. For example, the present invention includes antibodies which disrupt receptor/ligand interactions with polypeptides of the invention either partially or fully. The invention includes both receptor-specific antibodies and ligand-specific antibodies. The invention also includes receptor-specific antibodies which do not prevent ligand binding, but do prevent receptor activation. Receptor activation (i.e., signaling) can be determined by techniques described herein or as otherwise known in the art. For example, receptor activation can be determined by detecting the phosphorylation (e.g., on tyrosine or serine/threonine) of the receptor or its substrate by immunoprecipitation followed by western blot analysis. In specific embodiments, antibodies are provided that inhibit ligand activity or receptor activity by at least 95%, at least 90%, at least 85%, at least 80%, at least 75%, at least 70%, at least 60%, or at least 50% of the activity in the absence of the antibody.

[0173] In another embodiment of the present invention, antibodies that immunospecifically bind to a src biomarker protein or a fragment or variant thereof, comprise a polypeptide having the amino acid sequence of any one of the heavy chains expressed by an anti-src biomarker protein antibody-expressing cell line of the invention, and/or any one of the light chains expressed by an anti-src biomarker protein antibody-expressing cell line of the invention. In another embodiment of the present invention, antibodies that immunospecifically bind to a src biomarker protein or a fragment or variant thereof, comprise a polypeptide having the amino acid sequence of any one of the V_{H} domains of a heavy chain expressed by an anti-src biomarker protein antibody-expressing cell line, and/or any one of the V_{L} domains of a light chain expressed by an anti-src biomarker protein antibody-expressing cell line. In preferred embodiments, antibodies of the present invention comprise the amino acid sequence of a V_{H} domain and V_{L} domain expressed by a single anti-src biomarker protein antibody-expressing cell line. In alternative embodiments, antibodies of the present invention comprise the amino acid sequence of a V_{H} domain and a V_{L} domain expressed by two different anti-src biomarker protein antibody-expressing cell lines.

[0174] Molecules comprising, or alternatively consisting of, antibody fragments or variants of the V_{H} and/or V_{L} domains expressed by an anti-src biomarker protein antibody-expressing cell line that immunospecifically bind to a src biomarker protein are also encompassed by the invention, as are nucleic acid molecules encoding these V_{H} and V_{L} domains, molecules, fragments and/or variants.

[0175] The present invention also provides antibodies that immunospecificially bind to a polypeptide, or polypeptide fragment or variant of a src biomarker protein, wherein said antibodies comprise, or alternatively consist of, a polypeptide having an amino acid sequence of any one, two, three, or more of the V_{H} CDRs contained in a heavy chain expressed by one or more anti-src biomarker protein antibody expressing cell lines. In particular, the invention provides antibodies that immunospecifically bind to a src biomarker protein, comprising, or alternatively consisting of, a polypeptide having the amino acid sequence of a V_{H} CDR1 contained in a heavy chain expressed by one or more anti-src biomarker protein antibody expressing cell lines. In another embodiment, antibodies that immunospecifically bind to a src biomarker protein, comprise, or alternatively consist of, a polypeptide having the amino acid sequence of a V_{H} CDR2 contained in a heavy chain expressed by one or more anti-src biomarker protein antibody expressing cell lines. In a preferred embodiment, antibodies that immunospecifically bind to a src biomarker protein, comprise, or alternatively consist of, a polypeptide having the amino acid sequence of a V_{H} CDR3 contained in a heavy chain expressed by one or more anti-src biomarker protein antibody expressing cell line of the invention. Molecules comprising, or alternatively consisting of, these antibodies, or antibody fragments or variants thereof, that immunospecifically bind to a src biomarker protein or a Src biomarker protein fragment or variant thereof are also encompassed by the invention, as are nucleic acid molecules encoding these antibodies, molecules, fragments and/or variants.

[0176] The present invention also provides antibodies that immunospecificially bind to a polypeptide, or polypeptide fragment or variant of a src biomarker protein, wherein said antibodies comprise, or alternatively consist of, a polypeptide having an amino acid sequence of any one, two, three, or more of the V_{L} CDRs contained in a heavy chain expressed by one or more anti-src biomarker protein antibody expressing cell lines of the invention. In particular, the invention provides antibodies that immunospecifically bind to a src biomarker protein, comprising, or alternatively consisting of, a polypeptide having the amino acid sequence of a V_{L} CDR1 contained in a heavy chain expressed by one or more anti-src biomarker protein antibody-expressing cell lines of the invention. In another embodiment, antibodies that immunospecifically bind to a src biomarker protein, comprise, or alternatively consist of, a polypeptide having the amino acid sequence of a V_{L} CDR2 contained in a heavy chain expressed by one or more anti-src biomarker protein antibody-expressing cell lines of the invention. In a preferred embodiment, antibodies that immunospecifically bind to a src biomarker protein, comprise, or alternatively consist of a polypeptide having the amino acid sequence of a V_{L} CDR3 contained in a heavy chain expressed by one or more anti-src biomarker protein antibody-expressing cell lines of the invention. Molecules comprising, or alternatively consisting of, these antibodies, or antibody fragments or variants thereof, that immunospecifically bind to a src biomarker protein or a src biomarker protein fragment or variant thereof are also encompassed by the invention, as are nucleic acid molecules encoding these antibodies, molecules, fragments and/or variants.

[0177] The present invention also provides antibodies (including molecules comprising, or alternatively consisting of, antibody fragments or variants) that immunospecifically bind to a src biomarker protein polypeptide or polypeptide fragment or variant of a src biomarker protein, wherein the antibodies comprise, or alternatively consist of, one, two, three, or more V_{H} CDRS, and one, two, three or more V_{L} CDRS, as contained in a heavy chain or light chain expressed by one or more anti-src biomarker protein antibody-expressing cell lines of the invention. In particular, the invention provides antibodies that immunospecifically bind to a polypeptide or polypeptide fragment or variant of a src biomarker protein, wherein the antibodies comprise, or alternatively consist of, a V_{H} CDR1 and a V_{L} CDR1, a V_{H} CDR1 and a V_{L} CDR2, a V_{H} CDR1 and a V_{L} CDR3, a V_{H} CDR2 and a V_{L} CDR1, V_{H} CDR2 and V_{L} CDR2, a V_{H} CDR2 and a V_{L} CDR3, a V_{H} CDR3 and a V_{H} CDR1, a V_{H} CDR3 and a V_{L} CDR2, a V_{H} CDR3 and a V_{L} CDR3, or any combination thereof, of the V_{H} CDRs and V_{L} CDRs contained in a heavy chain or light chain immunoglobulin molecule expressed by one or more anti-src biomarker protein antibody-expressing cell lines of the invention. In a preferred embodiment, one or more of these combinations are from a single anti-src biomarker protein antibody-expressing cell line of the invention. Molecules comprising, or alternatively consisting of, fragments or variants of these antibodies that immunospecifically bind to the src biomarker proteins are also encompassed by the invention, as are nucleic acid molecules encoding these antibodies, molecules, fragments or variants.

[0178] The present invention also provides nucleic acid molecules, generally isolated, encoding an antibody of the invention (including molecules comprising, or alternatively consisting of, antibody fragments or variants thereof). In a specific embodiment, a nucleic acid molecule of the invention encodes an antibody (including molecules comprising, or alternatively consisting of, antibody fragments or variants thereof), comprising, or alternatively consisting of, a V_{H} domain having an amino acid sequence of any one of the V_{H} domains of a heavy chain expressed by an anti-src biomarker protein antibody-expressing cell line of the invention and a V_{L} domain having an amino acid sequence of a light chain expressed by an anti-src biomarker protein antibody-expressing cell line of the invention. In another embodiment, a nucleic acid molecule of the invention encodes an antibody (including molecules comprising, or alternatively consisting of, antibody fragments or variants thereof), comprising, or alternatively consisting of, a V_{H} domain having an amino acid sequence of any one of the V_{H} domains of a heavy chain expressed by an anti-src biomarker protein antibody-expressing cell line of the invention, or a V_{L} domain having an amino acid sequence of a light chain expressed by an anti-Src biomarker protein antibody-expressing cell line of the invention.

[0179] The present invention also provides antibodies that comprise, or alternatively consist of, variants (including derivatives) of the antibody molecules (e.g., the V_{H} domains and/or V_{L} domains) described herein, which antibodies immunospecifically bind to a src biomarker protein or fragment or variant thereof.

[0180] Standard techniques known to those of skill in the art can be used to introduce mutations in the nucleotide sequence encoding a molecule of the invention, including, for example, site-directed mutapolynucleotides and polypeptidesis and PCR-mediated mutapolynucleotides and polypeptidesis which result in amino acid substitutions. Preferably the molecules are immunoglobulin molecules. Also, preferably, the variants (including derivatives) encode less than 50 amino acid substitutions, less than 40 amino acid substitutions, less than 30 amino acid substitutions, less than 25 amino acid substitutions, less than 20 amino acid substitutions, less than 15 amino acid substitutions, less than 10 amino acid substitutions, less than 5 amino acid substitutions, less than 4 amino acid substitutions, less than 3 amino acid substitutions, or less than 2 amino acid substitutions, relative to the reference V_{H} domain, V_{H} CDR1, V_{H} CDR2, V_{H} CDR3, V_{L} domain, V_{L} CDR1, V_{L} CDR2, or V_{L} CDR3.

[0181] A “conservative amino acid substitution” is one in which the amino acid residue is replaced with an amino acid residue having a side chain with a similar charge. Families of amino acid residues having side chains with similar charges have been defined in the art. These families include amino acids with basic side chains (e.g., lysine, arginine, histidine), acidic side chains (e.g., aspartic acid, glutarniic acid), uncharged polar side chains (e.g., glycine, asparagine, glutane, serine, threonine, tyrosine, cysteine), nonpolar side chains (e.g., alanine, valine, leucine, isoleucine, proline, phenylalanine, methionine, tryptophan), beta-branched side chains (e.g., theonine, valine, isoleucine) and aromatic side chains (e.g., tyrosine, phenylalanine, tryptophan, histidine). Alternatively, mutations can be introduced randomly along all or part of the coding sequence, such as by saturation mutapolynucleotides and polypeptidesis. The resultant mutants can be screened for biological activity to identify mutants that retain activity.

[0182] For example, it is possible to introduce mutations only in framework regions or only in CDR regions of an antibody molecule. Introduced mutations can be silent or neutral missense mutations, i.e., have no, or little, effect on an antibody's ability to bind antigen. These types of mutations can be useful to optimize codon usage, or to improve hybridoma antibody production. Alternatively, non-neutral missense mutations can alter an antibody's ability to bind antigen. The location of most silent and neutral missense mutations is likely to be in the framework regions, while the location of most non-neutral missense mutations is likely to be in the CDRs, although this is not an absolute requirement. One of skill in the art is able to design and test mutant molecules with desired properties, such as no alteration in antigen binding activity or alteration in binding activity (e.g., improvements in antigen binding activity or change in antibody specificity). Following mutapolynucleotides and polypeptidesis, the encoded protein may routinely be expressed and the functional and/or biological activity of the encoded protein can be determined using techniques described herein or by routinely modifying techniques known and practiced in the art.

[0183] In a specific embodiment, an antibody of the invention (including a molecule comprising, or alternatively consisting of, an antibody fragment or variant thereof), that immunospecifically binds to src biomarker polypeptides or fragments or variants thereof, comprises, or alternatively consists of, an amino acid sequence encoded by a nucleotide sequence that hybridizes to a nucleotide sequence that is complementary to that encoding one of the V_{H} or V_{L} domains expressed by one or more anti-src biomarker protein antibody-expressing cell lines of the invention, preferably under stringent conditions, e.g., hybridization to filter-bound DNA in 6× sodium chloride/sodium citrate (SSC) at about 45° C. followed by one or more washes in 0.2×SSC/0.1% SDS at about 50-65° C., preferably under highly stringent conditions, e.g., hybridization to filter-bound nucleic acid in 6×SSC at about 45° C. followed by one or more washes in 0.1×SSC/0.2% SDS at about 68° C., or under other stringent hybridization conditions which are known to those of skill in the art (see, for example, Ausubel, F. M. et al., eds., 1989, Current Protocols in Molecular Biology, Vol. L, Green Publishing Associates, Inc. and John Wiley & Sons, Inc., New York at pages 6.3.1-6.3.6 and 2.10.3). Nucleic acid molecules encoding these antibodies are also encompassed by the invention.

[0184] It is well known within the art that polypeptides, or fragments or variants thereof, with similar amino acid sequences often have similar structure and many of the same biological activities. Thus, in one embodiment, an antibody (including a molecule comprising, or alternatively consisting of, an antibody fragment or variant thereof), that immunospecifically binds to a src biomarker polypeptide or fragments or variants of a src biomarker polypeptide, comprises, or alternatively consists of, a V_{H} domain having an amino acid sequence that is at least 35%, at least 40%, at least 45%, at least 50%, at least 55%, at least 60%, at least 65%, at least 70%, at least 75%, at least 80%, at least 85%, at least 90%, at least 95%, or at least 99% identical to the amino acid sequence of a V_{H} domain of a heavy chain expressed by an anti-src biomarker protein antibody-expressing cell line of the invention.

[0185] In another embodiment, an antibody (including a molecule comprising, or alternatively consisting of, an antibody fragment or variant thereof), that immunospecifically binds to a src biomarker polypeptide or fragments or variants of a src biomarker protein polypeptide, comprises, or alternatively consists of, a V_{L} domain having an amino acid sequence that is at least 35%, at least 40%, at least 45%, at least 50%, at least 55%, at least 60%, at least 65%, at least 70%, at least 75%, at least 80%, at least 85%, at least 90%, at least 95%, or at least 99% identical to the amino acid sequence of a V_{L} domain of a light chain expressed by an anti-src biomarker protein antibody-expressing cell line of the invention.

[0186] The present invention also provides antibodies (including molecules comprising, or alternatively consisting of, antibody fragments or variants thereof), that down-regulate the cell-surface expression of a src biomarker protein, as determined by any method known in the art such as, for example, FACS analysis or immunofluorescence assays. By way of a non-limiting hypothesis, such down-regulation may be the result of antibody induced internalization of src biomarker protein. Such antibodies can comprise, or alternatively consist of, a portion (e.g., V_{H} CDR1, V_{H} CDR2, V_{H} CDR3, V_{L} CDR1, V_{L} CDR2, or V_{L} CDR3) of a V_{H} or V_{L} domain having an amino acid sequence of an antibody of the invention, or a fragment or variant thereof.

[0187] In another embodiment, an antibody that down-regulates the cell-surface expression of a src biomarker protein comprises, or alternatively consists of, a polypeptide having the amino acid sequence of a V_{H} domain of an antibody of the invention, or a fragment or variant thereof and a V_{L} domain of an antibody of the invention, or a fragment or variant thereof. In another embodiment, an antibody that down-regulates the cell-surface expression of a src biomarker protein comprises, or alternatively consists of, a polypeptide having the amino acid sequence of a V_{H} domain and a V_{L} domain from a single antibody (or scPv or Fab fragment) of the invention, or fragments or variants thereof. In another embodiment, an antibody that down-regulates the cell-surface expression of a src biomarker protein comprises, or alternatively consists of, a polypeptide having the amino acid sequence of a V_{H} domain of an antibody of the invention, or a fragment or variant thereof. In another embodiment, an antibody that down-regulates the cell-surface expression of a src biomarker protein comprises, or alternatively consists of, a polypeptide having the amino acid sequence of a V_{L} domain of an antibody of the invention, or a fragment or variant thereof.

[0188] In a preferred embodiment, an antibody that down-regulates the cell-surface expression of a src biomarker protein comprises, or alternatively consists of, a polypeptide having the amino acid sequence of a V_{H} CDR3 of an antibody of the invention, or a fragment or variant thereof. In another preferred embodiment, an antibody that down-regulates the cell-surface expression of a src biomarker protein comprises, or alternatively consists of, a polypeptide having the amino acid sequence of a V_{L} CDR3 of an antibody of the invention, or a fragment or variant thereof. Nucleic acid molecules encoding these antibodies are also encompassed by the invention.

[0189] In another preferred embodiment, an antibody that enhances the activity of a src biomarker protein, or a fragment or variant thereof, comprises, or alternatively consists of, a polypeptide having the amino acid sequence of a V_{L} CDR3 of an antibody of the invention, or a fragment or variant thereof. Nucleic acid molecules encoding these antibodies are also encompassed by the invention.

[0190] As nonlimiting examples, antibodies of the present invention can be used to purify, detect, and target the polypeptides of the present invention, including both in vitro and in vivo diagnostic, detection, screening, and/or therapeutic methods. For example, the antibodies have use in immunoassays for qualitatively and quantitatively measuring levels of the src biomarker polypeptides of the present invention in biological samples. (See, e.g., Harlow et al., Antibodies: A Laboratory Manual, Cold Spring Harbor Laboratory Press, 2nd Ed. 1988, which is incorporated by reference herein in its entirety).

[0191] By way of another nonlimiting example, antibodies of the invention can be administered to individuals as a form of passive immunization. Alternatively, antibodies of the present invention can be used for epitope mapping to identify the epitope(s) that are bound by the antibody. Epitopes identified in this way can, in turn, for example, be used as vaccine candidates, i.e., to immunize an individual to elicit antibodies against the naturally-occurring forms of one or more src biomarker proteins.

[0192] As discussed in more detail below, the antibodies of the present invention can be used either alone or in combination with other compositions. The antibodies can further be recombinantly fused to a heterologous polypeptide at the N- or C-terminus, or chemically conjugated (including covalent and non-covalent conjugations) to polypeptides or other compositions. For example, antibodies of the present invention can be recombinantly fused or conjugated to molecules that are useful as labels in detection assays and to effector molecules such as heterologous polypeptides, drugs, radionuclides, or toxins. See, e.g., PCT publications WO 92/08495; WO 91/14438; WO 89/12624; U.S. Pat. No. 5,314,995 and BP 396, 387.

[0193] The antibodies of the invention include derivatives that are modified, i.e., by the covalent attachment of any type of molecule to the antibody. For example, without limitation, the antibody derivatives include antibodies that have been modified, e.g., by glycosylation, acetylation, pegylation, phosphorylation, amidation, derivatization by known protecting/blocking groups, proteolytic cleavage, linkage to a cellular ligand or other protein, etc. Any of numerous chemical modifications may be carried out by known techniques, including, but not limited to, specific chemical cleavage, acetylation, formylation, metabolic synthesis of tunicamycin, etc. Additionally, the derivative can contain one or more non-classical amino acids.

[0194] The antibodies of the present invention may be generated by any suitable method known in the art. Polyclonal antibodies directed against an antigen or immunogen of interest can be produced by various procedures well known in the art. For example, a src biomarker polypeptide or peptide of the invention can be administered to various host animals as elucidated above to induce the production of sera containing polyclonal antibodies specific for the antigen. Various adjuvants may be used to increase the immunological response, depending on the host species; adjuvants include, but are not limited to, Freund's (complete and incomplete), mineral gels such as aluminum hydroxide, surface active substances such as lysolecithin, pluronic polyols, polyanions, peptides, oil emulsions, keyhole limpet hemocyanins, dinitrophenol, and potentially useful human adjuvants such as BCG (bacille Calmette-Guerin) and corynebacterium parvum. Such adjuvants are also well known in the art.

[0195] Monoclonal antibodies can be prepared using a wide variety of techniques known in the art, including the use of hybridoma, recombinant and phage display technologies, or a combination thereof. For example, monoclonal antibodies can be produced using hybridoma techniques as known and practiced in the art and as taught, for example, in Harlow et al., Antibodies: A Laboratory Manual, (Cold Spring Harbor Laboratory Press, 2nd Ed. 1988; Hammerling, et al., In: Monoclonal Antibodies and T-Cell Hybridomas, Elsevier, N.Y., pages 563-681, 1981, the contents of which are incorporated herein by reference in their entireties. The term “monoclonal antibody” as used herein is not limited to antibodies produced through hybridoma technology. The term “monoclonal antibody” refers to an antibody that is derived from a single clone, including any eukaryotic, prokaryotic, or phage clone, and not the method by which it is produced.

[0196] Methods for producing and screening for specific antibodies using hybridoma technology are routine and well known in the art. In a nonlimiting example, mice can be immunized with a polypeptide or peptide of the invention, or with a cell expressing the polypeptide or peptide. Once an immune response is detected, e.g., antibodies specific for the antigen are detected in the sera of immunized mice, the spleen is harvested and splenocytes are isolated. The splenocytes are then fused by well known techniques to any suitable myeloma cells, for example cells from cell line SP2/0 or P3×63-AG8.653 available from the ATCC. Hybridomas are selected and cloned by limiting dilution techniques. The hybridoma clones are then assayed by methods known in the art to determine and select those cells that secrete antibodies capable of binding to a polypeptide of the invention. Ascites fluid, which generally contains high levels of antibodies, can be generated by immunizing mice with positive hybridoma clones.

[0197] Accordingly, the present invention encompasses methods of generating monoclonal antibodies, as well as the antibodies produced by these methods, comprising culturing a hybridoma cell secreting an antibody of the invention wherein, preferably, the hybridoma is generated by fusing splenocytes isolated from a mouse immunized with a src biomarker polypeptide or peptide antigen of the invention with myeloma cells and then screening the hybridomas resulting from the fusion for hybridoma clones that secrete an antibody that binds to a polypeptide of the invention. Another well known method for producing both polyclonal and monoclonal human B cell lines is transformation using Epstein Barr Virus (EBV). Protocols for generating EBV-transformed B cell lines are commonly known in the art, such as, for example, the protocol outlined in Chapter 7.22 of Current Protocols in Immunology, Coligan et al., Eds., 1994, John Wiley & Sons, NY, which is hereby incorporated by reference herein in its entirety. The source of B cells for transformation is commonly human peripheral blood, but B cells for transformation can also be obtained from other sources including, but not limited to, lymph node, tonsil, spleen, tumor tissue, and infected tissues. Tissues are generally prepared as single cell suspensions prior to EBV transformation. In addition, T cells that may be present in the B cell samples can be either physically removed or inactivated (e.g., by treatment with cyclosporin A). The removal of T cells is often advantageous, because T cells from individuals seropositive for anti-EBV antibodies can suppress B cell immortalization by EBV. In general, a sample containing human B cells is innoculated with EBV and cultured for 3-4 weeks. A typical source of EBV is the culture supernatant of the B95-8 cell line (ATCC; VR-1492). Physical signs of EBV transformation can generally be seen toward the end of the 3-4 week culture period.

[0198] By phase-contrast microscopy, transformed cells appear large, clear and “hairy”; they tend to aggregate in fight clusters of cells. Initially, EBV lines are generally polyclonal. However, over prolonged periods of cell culture, EBV lines can become monoclonal as a result of the selective outgrowth of particular B cell clones. Alternatively, polyclonal EBV transformed lines can be subcloned (e.g., by limiting dilution) or fused with a suitable fusion partner and plated at limiting dilution to obtain monoclonal B cell lines. Suitable fusion partners for EBV transformed cell lines include mouse myeloma cell lines (e.g., SP2/0, X63-Ag8.653), heteromyeloma cell lines (human×mouse; e.g., SPAM-8, SBC-H20, and CB-F7), and human cell lines (e.g., GM 1500, SKO-007, RPMI 8226, and KR-4). Thus, the present invention also includes a method of generating polyclonal or monoclonal human antibodies against polypeptides of the invention or fragments thereof, comprising EBV-transformation of human B cells.

[0199] Antibody fragments that recognize specific epitopes can be generated by known techniques. For example, Fab and F(ab′)2 fragments of the invention may be produced by proteolytic cleavage of immunoglobulin molecules, using enzymes such as papain (to produce Fab fragments) or pepsin (to produce F (ab′) 2 fragments). F(ab′)2 fragments contain the variable region, the light chain constant region and the CH1 domain of the heavy chain.

[0200] Antibodies encompassed by the present invention can also be generated using various phage display methods known in the art. In phage display methods, functional antibody domains are displayed on the surface of phage particles which carry the polynucleotide sequences encoding them. In a particular embodiment, such phage can be utilized to display antigen binding domains expressed from a repertoire or combinatorial antibody library (e.g., human or murine). Phage expressing an antigen binding domain that binds to the antigen of interest can be selected or identified with antigen, e.g., using labeled antigen or antigen bound or captured onto a solid surface or bead. Phage used in these methods are typically filamentous phage including fd and M13 binding domains expressed from phage with Fab, Fv or disulfide stabilized Fv antibody domains recombinantly fused to either the phage gene III or gene VIII protein. Examples of phage display methods that can be used to make the antibodies of the present. invention include those disclosed in Brinkman et al., 1995, J. Immunol. Methods, 182:41-50; Ames et al., 1995, J. Immunol. Methods, 184:177-186; Kettleborough et al., 1994, Eur. J. Immunol., 24:952-958; Persic et al., 1997, Gene, 187:9-18; Burton et al., 1994, Advances in Immunology, 57:191-280; PCT application No. PCT/GB91/01134; PCT publications WO 90/02809; WO 91/10737; WO 92/01047; WO 92/18619; WO 93/11236; WO 95/15982; WO 95/20401; and U.S. Pat. Nos. 5,698,426; 5,223,409; 5,403,484; 5,580,717; 5,427,908; 5,750,753; 5,821,047; 5,571,698; 5,427,908; 5,516,637; 5,780,225; 5,658,727; 5,733,743 and 5,969,108, each of which is incorporated herein by reference in its entirety.

[0201] As described in the above references, after phage selection, the antibody coding regions from the phage can be isolated and used to generate whole antibodies, including human antibodies, or any other desired antigen binding fragment, and expressed in any desired host, including mammalian cells, insect cells, plant cells, yeast, and bacteria, e.g., as described in detail below. For example, techniques to recombinantly produce Fab, Fab′ and F(ab′)2 fragments can also be employed using methods known in the art such as those disclosed in PCT publication WO 92/22324; Mullinax et al., 1992, BioTechniques, 12(6):864-869; Sawai et al., 1995, AJRI, 34:2634; and Better et al., 1988, Science, 240:1041-1043, which are hereby incorporated by reference herein in their entireties.

[0202] Examples of techniques that can be used to produce single-chain Fvs and antibodies include those described in U.S. Pat. Nos. 4,946,778 and 5,258,498; Huston et al., 1991, Methods in Enzymology, 203:46-88; Shu et al., 1993, Proc. Natl. Acad. Sci. USA, 90:7995-7999; and Skerra et al., 1988, Science, 240:1038-1040. For some uses, including the in vivo use of antibodies in humans and in in vitro detection assays, it may be preferable to use chimeric, humanized, or human antibodies. A chimeric antibody is a molecule in which different portions of the antibody are derived from different animal species, such as antibodies having a variable region derived from a murine monoclonal antibody and a human immunoglobulin constant region. Methods for producing chimeric antibodies are known in the art. (See, e.g., Morrison, 1985, Science, 229:1202; Oi et al., 1986, BioTechniques, 4:214; Gillies et al., 1989, J. Immunol. Methods, 125:191-202; and U.S. Pat. Nos. 5,807,715; 4,816,567; and 4,816,397, which are incorporated herein by reference in their entirety).

[0203] Humanized antibodies are antibody molecules from non-human species antibody that bind to the desired antigen and have one or more complementarity determining regions (CDRs) from the nonhuman species and framework regions from a human immunoglobulin molecule. Often, framework residues in the human framework regions are substituted with the corresponding residues from the CDR donor antibody to alter, preferably improve, antigen binding. These framework substitutions are identified by methods well known in the art, e.g., by modeling of the interactions of the CDR and framework residues to identify framework residues important for antigen binding, and by sequence comparison to identify unusual framework residues at particular positions. (See, e.g., Queen et al., U.S. Pat. No. 5,585,089; and Riechmann et al., 1988, Nature, 332:323, which are incorporated herein by reference in their entireties). Antibodies can be humanized using a variety of techniques known in the art, including, for example, CDR-grafting (EP 239,400; PCT publication WO 91/09967; U.S. Pat. Nos. 5,225,539; 5,530,101; and 5,585,089); veneering or resurfacing (EP 592,106; EP 519,596; Padlan, 1991, Molecular Immunology, 28(4/5):489-498; Studnicka et al., 1994, Protein Engineering, 7(6):805-814; Roguska et al., 1994, Proc. Natl. Acad. Sci. USA, 91:969-973; and chain shuffling (U.S. Pat. No. 5,565,332).

[0204] Completely human antibodies can be made by a variety of methods known in the art, including the phage display methods described above, using antibody libraries derived from human immunoglobulin sequences. See also, U.S. Pat. Nos. 4,444,887 and 4,716,111; and PCT publications WO 98/46645, WO 98/50433, WO 98/24893, WO 98/16654, WO 96/34096, WO 96/33735, and WO 91/10741; each of which is incorporated herein by reference in its entirety.

[0205] Completely human antibodies are particularly desirable for therapeutic treatment of human patients, so as to avoid or alleviate immune reaction to foreign protein. Human antibodies can be made by a variety of methods known in the art, including the phage display methods described above, using antibody libraries derived from human immunoglobulin sequences. See also, U.S. Pat. Nos. 4,444,887 and 4,716,111; and PCT publications WO 98/46645, WO 98/50433, WO 98/24893, WO 98/16654, WO 96/34096, WO 96/33735, and WO 91/10741; each of which is incorporated herein by reference in its entirety.

[0206] Human antibodies can also be produced using transgenic mice which are incapable of expressing functional endogenous immunoglobulins, but which can express human immunoglobulin polynucleotides and polypeptides. For example, the human heavy and light chain immunoglobulin gene complexes can be introduced randomly, or by homologous recombination, into mouse embryonic stem cells. Alternatively, the human variable region, constant region, and diversity region may be introduced into mouse embryonic stem cells, in addition to the human heavy and light chain polynucleotides and polypeptides. The mouse heavy and light chain immunoglobulin polynucleotides and polypeptides can be rendered nonfunctional separately or simultaneously with the introduction of human immunoglobulin loci by homologous recombination. In particular, homozygous deletion of the J_{H} region prevents endogenous antibody production. The modified embryonic stem cells are expanded and microinjected into blastocysts to produce chimeric mice. The chimeric mice are then bred to produce homozygous offspring which express human antibodies. The transgenic mice are immunized in the normal fashion with a selected antigen, e.g., all or a portion of a polypeptide of the invention.

[0207] Monoclonal antibodies directed against the antigen can be obtained from the immunized transgenic mice using conventional hybridoma technology. The human immunoglobulin transpolynucleotides and polypeptides harbored by the transgenic mice rearrange during B cell differentiation, and subsequently undergo class switching and somatic mutation.

[0208] Thus, using such a technique, it is possible to produce useful human IgG, IgA, IgM and IgE antibodies. For an overview of the technology for producing human antibodies, see Lonberg and Huszar, 1995, Intl. Rev. Immunol., 13:65-93. For a detailed discussion of the technology for producing human antibodies and human monoclonal antibodies and protocols for producing such antibodies, see, e.g., PCT publications WO 98/24893; WO 92101047; WO 96/34096; WO 96/33735; European Patent No. 0 598 877; U.S. Pat. Nos. 5,413,923; 5,625,126; 5,633,425; 5,569,825; 5,661,016; 5,545,806; 5,814,318; 5,885,793; 5,916,771; 5,939,598; 6,075,181; and 6,114,598, which are incorporated by reference herein in their entirety. In addition, companies such as Abgenix, Inc. (Fremont, Calif.) and Genpharm (San Jose, Calif.) can be engaged to provide human antibodies directed against a selected antigen using technology similar to the above described technologies.

[0209] Completely human antibodies which recognize a selected epitope can be generated using a technique referred to as “guided selection”. In this approach, a selected non-human monoclonal antibody, e.g., a mouse antibody, is used to guide the selection of a completely human antibody recognizing the same epitope. (Jespers et al., 1988, BioTechnology, 12:899-903).

[0210] Further, antibodies to the polypeptides of the invention can, in turn, be utilized to generate anti-idiotypic antibodies that “mimic” src biomarker polypeptides of the invention using techniques well known to those skilled in the art. (See, e.g., Greenspan and Bona, 1989, FASEB J., 7(5):437-444 and Nissinoff, 1991, J. Immunol., 147(8):2429-2438). For example, antibodies which bind to and competitively inhibit polypeptide multimerization and/or binding of a polypeptide of the invention to a ligand can be used to generate anti-idiotypes that “mimic” the polypeptide multimerization and/or binding domain and, as a consequence, bind to and neutralize the polypeptide and/or its ligand, e.g., in therapeutic regimens. Such neutralizing anti-idiotypes or Fab fragments of such anti-idiotypes can be used to neutralize polypeptide ligand. For example, such anti-idiotypic antibodies can be used to bind a polypeptide of the invention and/or to bind its ligands/receptors, and thereby activate or block its biological activity.

[0211] Intrabodies are antibodies, often scFvs, that are expressed from a recombinant nucleic acid molecule and are engineered to be retained intracellularly (e.g., retained in the cytoplasm, endoplasmic reticulum, or periplasm of the host cells). Intrabodies can be used, for example, to ablate the function of a protein to which the intrabody binds. The expression of intrabodies can also be regulated through the use of inducible promoters in the nucleic acid expression vector comprising nucleic acid encoding the intrabody. Intrabodies of the invention can be produced using methods known in the art, such as those disclosed and reviewed in Chen et al., 1994, Hum. Gene Ther., 5:595-601; Marasco, W. A., 1997, Gene Ther., 4:11-15; Rondon and Marasco, 1997, Annu. Rev. Microbiol., 51:257-283; Proba et al., 1998, J. Mol. Biol., 275:245-253; Cohen et al., 1998, Oncogene, 17:2445-2456; Ohage and Steipe, 1999, J. Mol. Biol., 291:1119-1128; Ohage et al., 1999,J. Mol. Biol., 291:1129-1134; Wirtz and Steipe, 1999, Protein Sci., 8:2245-2250; Zhu et al., 1999, J. Immunol. Methods, 231:207-222.

[0212] XenoMouse Technology Antibodies in accordance with the invention are preferably prepared by the utilization of a transgenic mouse that has a substantial portion of the human antibody producing genome inserted, but that is rendered deficient in the production of endogenous murine antibodies (e.g., XenoMouse strains available from Abgenix Inc., Fremont, Calif.). Such mice are capable of producing human immunoglobulin molecules and antibodies and are virtually deficient in the production of murine immunoglobulin molecules and antibodies. Technologies utilized for achieving the same are disclosed in the patents, applications, and references disclosed herein.

[0213] The ability to clone and reconstruct megabase-sized human loci in YACs and to introduce them into the mouse germline provides a powerful approach to elucidating the functional components of very large or crudely mapped loci, as well as generating useful models of human disease. Furthermore, the utilization of such technology for substitution of mouse loci with their human equivalents could provide unique insights into the expression and regulation of human gene products during development, their communication with other systems, and their involvement in disease induction and progression. An important practical application of such a strategy is the “humanization” of the mouse humoral immune system. Introduction of human immunoglobulin (Ig) loci into mice in which the endogenous Ig polynucleotides and polypeptides have been inactivated offers the opportunity to study the mechanisms underlying programmed expression and assembly of antibodies as well as their role in B cell development. Furthermore, such a strategy could provide an ideal source for the production of fully human monoclonal antibodies (Mabs) an important milestone toward fulfilling the promise of antibody therapy in human disease.

[0214] Fully human antibodies are expected to minimize the immunogenic and allergic responses intrinsic to mouse or mouse-derivatized monoclonal antibodies and thus to increase the efficacy and safety of the administered antibodies. The use of fully human antibodies can be expected to provide a substantial advantage in the treatment of chronic and recurring human diseases, such as cancer, which require repeated antibody administrations.

[0215] One approach toward this goal was to engineer mouse strains deficient in mouse antibody production to harbor large fragments of the human Ig loci in anticipation that such mice would produce a large repertoire of human antibodies in the absence of mouse antibodies. Large human Ig fragments would preserve the large variable gene diversity as well as the proper regulation of antibody production and expression. By exploiting the mouse machinery for antibody diversification and selection and the lack of immunological tolerance to human proteins, the reproduced human antibody repertoire in these mouse strains should yield high affinity antibodies against any antigen of interest, including human antigens. Using the hybridoma technology, antigen-specific human monoclonal antibodies with the desired specificity could be readily produced and selected.

[0216] This general strategy was demonstrated in connection with the generation of the first “XenoMouseT” strains as published in 1994. See Green et al., 1994, Nature Genetics, 7:13-21. The XenoMouse strains were engineered with yeast artificial chromosomes (YACS) containing 245 kb and 10 190 kb-sized germline configuration fragments of the human heavy chain locus and kappa light chain locus, respectively, which contained core variable and constant region sequences. Id. The human Ig containing YACs proved to be compatible with the mouse system for both rearrangement and expression of antibodies and were capable of substituting for the inactivated mouse Ig polynucleotides and polypeptides. This was demonstrated by their ability to induce B-cell development, to produce an adult-like human repertoire of fully human antibodies, and to generate antigen-specific human monoclonal antibodies. These results also suggested that introduction of larger portions of the human Ig loci containing greater numbers of V polynucleotides and polypeptides, additional regulatory elements, and human Ig constant regions might recapitulate substantially the full repertoire that is characteristic of the human humoral response to infection and immunization. The work of Green et al. was recently extended to the introduction of greater than approximately 80% of the human antibody repertoire through the use of megabase-sized, germline configuration YAC fragments of the human heavy chain loci and kappa light chain loci, respectively, to produce XenoMouse mice. See Mendez et al., 1997, Nature Genetics, 15:146-156; Green and Jakobovits, 1998, J. Exp. Med., 188:483495; and Green, 1999, Journal of Immunological Methods, 231:11-23, the disclosures of which are hereby incorporated herein by reference.

[0217] Human anti-mouse antibody (HAMA) responses have led the industry to prepare chimeric or otherwise humanized antibodies. While chimeric antibodies typically are comprised of a human constant region and a murine variable region, it is expected that certain human anti-chimeric antibody (HACA) responses will be observed, particularly in treatments involving chronic or multi-dose utilizations of the antibody. Thus, it is desirable to provide fully human antibodies against src biomarker polypeptides in order to vitiate concerns and/or effects of HAMA or HACA responses.

[0218] Polypeptide antibodies of the invention may be chemically synthesized or produced through the use of recombinant expression systems. Accordingly, the invention further embraces polynucleotides comprising a nucleotide sequence encoding an antibody of the invention and fragments thereof. The invention also encompasses polynucleotides that hybridize under stringent or lower stringency hybridization conditions, e.g., as defined supra, to polynucleotides that encode an antibody, preferably, an antibody that specifically binds to a polypeptide of the invention, preferably, an antibody that binds to a polypeptide having the amino acid sequence of one or more of the src biomarker sequences as set forth in Tables 3-6.

[0219] The polynucleotides may be obtained, and the nucleotide sequence of the polynucleotides determined, by any method known in the art. For example, if the nucleotide sequence of the antibody is known, a polynucleotide encoding the antibody can be assembled from chemically synthesized oligonucleotides (e.g., as described in Kutmeier et al., 1994, BioTechniques, 17:242), which, briefly, involves the synthesis of overlapping oligonucleotides containing portions of the sequence encoding the antibody, the annealing and ligating of those oligonucleotides, and then the amplification of the ligated oligonucleotides by PCR.

[0220] Alternatively, a polynucleotide encoding an antibody can be generated from nucleic acid from a suitable source. If a clone containing a nucleic acid encoding a particular antibody is not available, but the sequence of the antibody molecule is known, a nucleic acid encoding the immunoglobulin can be chemically synthesized or obtained from a suitable source (e.g., an antibody cDNA library, or a cDNA library generated from, (or a nucleic acid, preferably poly A+ RNA, isolated from), any tissue or cells expressing the antibody, such as hybridoma cells selected to express an antibody of the invention by PCR amplification using synthetic primers hybridizable to the 3′ and 5′ ends of the sequence. Alternatively, cloning using an oligonucleotide probe specific for the particular gene sequence to identify, e.g., a cDNA clone from a cDNA library that encodes the antibody can be employed. Amplified nucleic acids generated by PCR can then be cloned into replicable cloning vectors using any method well known in the art.

[0221] Once the nucleotide sequence and corresponding amino acid sequence of the antibody are determined, the nucleotide sequence of the antibody can be manipulated using methods well known in the art for the manipulation of nucleotide sequences, e.g., recombinant DNA techniques, site directed mutapolynucleotides and polypeptidesis, PCR, etc. (see, for example, the techniques described in Sambrook et al., 1990, Molecular Cloning, A Laboratory Manual, 2nd Ed., Cold Spring Harbor Laboratory, Cold Spring Harbor, N.Y.; and Ausubel et al., eds., 1998, Current Protocols in Molecular Biology, John Wiley & Sons, NY, which are both incorporated by reference herein in their entireties), to generate antibodies having a different amino acid sequence, for example, to create amino acid substitutions, deletions, and/or insertions.

[0222] In a specific embodiment, the amino acid sequence of the heavy and/or light chain variable domains can be inspected to identify the sequences of the CDRs by methods that are well known in the art, e.g., by comparison to known amino acid sequences of other heavy and light chain variable regions, to determine the regions of sequence hypervariability. Using routine recombinant DNA techniques, one or more of the CDRs can be inserted within framework regions, e.g., into human framework regions, to humanize a non-human antibody, as described supra. The framework regions can be naturally occurring or consensus framework regions, and preferably, are human framework regions (see, e.g., Chothia et al., 1998, J. Mol. Biol.; 278:457-479 for a listing of human framework regions).

[0223] Preferably, the polynucleotide generated by the combination of the framework regions and CDRs encodes an antibody that specifically binds to a src biomarker polypeptide of the invention. Also preferably, as discussed supra, one or more amino acid substitutions can be made within the framework regions; such amino acid substitutions are performed with the goal of improving binding of the antibody to its antigen. In addition, such methods can be used to make amino acid substitutions or deletions of one or more variable region cysteine residues participating in an intrachain disulfide bond to generate antibody molecules lacking one or more intrachain disulfide bonds. Other alterations to the polynucleotide are encompassed by the present invention and are within the skill of the art.

[0224] For some uses, such as for in vitro affinity maturation of an antibody of the invention, it is useful to express the V_{H} and V_{L} domains of the heavy and light chains of one or more antibodies of the invention as single chain antibodies, or Fab fragments, in a phage display library using phage display methods as described supra. For example, the cDNAs encoding the V_{H} and V_{L} domains of one or more antibodies of the invention can be expressed in all possible combinations using a phage display library, thereby allowing for the selection of V_{H}/V_{L} combinations that bind to the src biomarker polypeptides according to the present invention with preferred binding characteristics such as improved affinity or improved off rates. In addition, V_{H} and V_{L} segments, particularly, the CDR regions of the V_{H} and V_{L} domains of one or more antibodies of the invention, can be mutated in vitro. Expression of V_{H} and V_{L} domains with “mutant” CDRs in a phage display library allows for the selection of V_{H}/V_{L} combinations that bind to src biomarker proteins which are receptor polypeptides with preferred binding characteristics such as improved affinity or improved off rates.

[0225] In phage display methods, functional antibody domains are displayed on the surface of phage particles which carry the polynucleotide sequences encoding them. In particular, DNA sequences encoding the V_{H} and V_{L} domains are amplified from animal cDNA libraries (e.g., human or murine cDNA libraries of lymphoid tissues) or from synthetic cDNA libraries. The DNA encoding the V_{H} and V_{L} domains are joined together by an scFv linker by PCR and cloned into a phagemid vector (e.g., p CANTAB 6 or pComb 3 HSS). The vector is introduced into E. coli via electroporation and the E. coli is infected with helper phage. Phage used in these methods are typically filamentous phage, including fd and M13, and the V_{H} and V_{L} domains are usually recombinantly fused either to the phage gene III or gene VIII. Phage expressing an antigen binding domain that binds to an antigen of interest (i.e., a src biomarker polypeptide or a fragment thereof) can be selected or identified with antigen, e.g., using labeled antigen or antigen bound or captured onto a solid surface or bead.

[0226] The antibodies according to the invention can be produced by any method known in the art for the synthesis of antibodies, in particular, by chemical synthesis, by intracellular immunization (i.e., intrabody technology), or preferably, by recombinant expression techniques. Methods of producing antibodies include, but are not limited to, hybridoma technology, EBV transformation, and other methods discussed herein as well as through the use recombinant DNA technology, as discussed below.

[0227] Recombinant expression of an antibody of the invention, or fragment, derivative, variant or analog thereof, (e.g., a heavy or light chain of an antibody of the invention or a single chain antibody of the invention), requires construction of an expression vector containing a polynucleotide that encodes the antibody. Once a polynucleotide encoding an antibody molecule or a heavy or light chain of an antibody, or portion thereof (preferably containing the heavy or light chain variable domain), of the invention has been obtained, the vector for the production of the antibody molecule can be produced by recombinant DNA technology using techniques well known in the art. Methods for preparing a protein by expressing a polynucleotide encoding an antibody are described herein. Methods which are well known to those skilled in the art can be used to construct expression vectors containing antibody coding sequences and appropriate transcriptional and translational control signals. These methods include, for example, in vitro recombinant DNA techniques, synthetic techniques, and in vivo genetic recombination. The invention, thus embraces replicable vectors comprising a nucleotide sequence encoding an antibody molecule of the invention, or a heavy or light chain thereof, or a heavy or light chain variable domain, operably linked to a promoter. Such vectors can include the nucleotide sequence encoding the constant region of the antibody molecule (see, e.g., PCT Publication WO 86/05807; PCT Publication WO 89/01036; and U.S. Pat. No. 5,122,464) and the variable domain of the antibody can be cloned into such a vector for expression of the entire heavy or light chain.

[0228] The expression vector is transferred to a host cell by conventional techniques and the transfected cells are then cultured by conventional techniques to produce an antibody of the invention. Thus, the invention includes host cells containing a polynucleotide encoding an antibody of the invention, or a heavy or light chain thereof, or a single chain antibody of the invention, operably linked to a heterologous promoter. In preferred embodiments for the expression of double-chained antibodies, vectors encoding both the heavy and light chains may be co-expressed in the host cell for expression of the entire immunoglobulin molecule, as detailed below.

[0229] A variety of host expression vector systems can be utilized to express the antibody molecules of the invention. Such expression systems represent vehicles by which the coding sequences of interest can be expressed, their encoded products produced and subsequently purified. These systems also represent cells which can, when transformed or transfected with the appropriate nucleotide coding sequences, express an antibody molecule of the invention in situ. Cell expression systems include, but are not limited, to microorganisms such as bacteria (e.g., E. coli, B. subtilis) transformed with recombinant bacteriophage DNA, plasmid DNA or cosmid DNA expression vectors containing antibody coding sequences; yeast (e.g., Saccharomyces or Pichia) transformed with recombinant yeast expression vectors containing antibody coding sequences; insect cell systems infected with recombinant virus expression vectors (e.g., baculovirus) containing antibody coding sequences; plant cell systems infected with recombinant virus expression vectors (e.g., cauliflower mosaic virus (CaMV) or tobacco mosaic virus (TMV)), transformed with recombinant plasmid expression vectors (e.g., Ti plasmid) containing antibody coding sequences; or mammalian cell systems (e.g., COS, CHO, BHK, 293, 3T3, NSO cells) harboring recombinant expression constructs containing promoters derived from the genome of mammalian cells (e.g., metallothionein promoter) or from mammalian viruses (e.g., the adenovirus late promoter; the vaccinia virus 7.5K promoter). Preferably, bacterial cells such as E. coli, and more preferably, eukaryotic cells, especially for the expression of whole recombinant antibody molecules, are used for the expression of a recombinant antibody molecule. For example, mammalian cells such as Chinese hamster ovary (CHO) cells, in conjunction with a vector such as the major intermediate early gene promoter element from human cytomegalovirus, is an effective expression system for antibodies (Foecking et al., 1986, Gene, 45:101; Cockett et al., 1990, BioTechnology, 8:2).

[0230] In bacterial systems, a number of expression vectors can be advantageously selected depending upon the use intended for the antibody molecule being expressed. For example, when a large quantity of such a protein is to be produced for the generation of pharmaceutical compositions of an antibody molecule, for example, vectors that direct the expression of high levels of fusion protein products that are readily purified are often desirable. Such vectors include, but are not limited to, the E. coli expression vector pUR278 (Ruther et al., 1983, EMBO J., 2:1791), in which the antibody coding sequence can be ligated individually into the vector in-frame with the lacZ coding region so that a fusion protein is produced; pIN vectors (Inouye & Inouye, 1985, Nucleic Acids Res., 13:3101-3109; Van Heeke & Schuster, 1989, J. Biol. Chem., 24:5503-5509; and the like). pGEX vectors may also be used to express foreign polypeptides as fusion proteins with glutathione S-transferase (GST). In general, such fusion proteins are soluble and can easily be purified from lysed cells by adsorption and binding to matrix glutathione-agarose beads followed by elution in the presence of free glutathione. The pGEX vectors are designed to include thrombin or factor Xa protease cleavage sites so that the cloned target gene product can be released from the GST moiety.

[0231] In an insect system, Autographa californica nuclear polyhedrosis virus (AcNPV) is used as a vector to express foreign polynucleotides and polypeptides. The virus grows in Spodoptera figuriperda cells. The antibody coding sequence may be cloned individually into non-essential regions (for example the polyhedrin gene) of the virus and placed under control of an AcNPV promoter (for example the polyhedrin promoter).

[0232] In mammalian host cells, a number of viral based expression systems can be utilized. In cases in which an adenovirus is used as an expression vector, the antibody coding sequence of interest can be ligated to an adenovirus transcription/translation control complex, e.g., the late promoter and tripartite leader sequence. This chimeric gene can then be inserted in the adenovirus genome by in vitro or in vivo recombination. Insertion in a non-essential region of the viral genome (e.g., region E1 or E3) results in a recombinant virus that is viable and capable of expressing the antibody molecule in infected hosts. (See, e.g., Logan and Shenk, 1984, Proc. Natl. Acad. Sci. USA, 81:355-359). Specific initiation signals can also be required for efficient translation of inserted antibody coding sequences. These signals include the ATG initiation codon and adjacent sequences. Furthermore, the initiation codon must be in-phase with the reading frame of the desired coding sequence to ensure translation of the entire insert. These exogenous translational control signals and initiation codons can be of a variety of origins, both natural and synthetic. The efficiency of expression can be enhanced by the inclusion of appropriate transcription enhancer elements, transcription terminators, etc. (see Bittner et al., 1987, Methods in Enzymol., 153:51-544).

[0233] In addition, a host cell strain can be chosen which modulates the expression of the inserted sequences, or modifies and processes the gene product in the specific fashion desired. Such modifications (e.g., glycosylation) and processing (e.g., cleavage) of protein products can be important for the function of the protein.

[0234] Different host cells have characteristic and specific mechanisms for the post-translational processing and modification of proteins and gene products. Appropriate cell lines or host systems can be chosen to ensure the correct modification and processing of the foreign protein expressed. To this end, eukaryotic host cells which possess the cellular machinery for proper processing of the primary transcript, glycosylation, and phosphorylation of the gene product can be used. Such mammalian host cells include, but are not limited to, CHO, VERY, BHK, Hela, COS, MDCK, 293, 3T3, W138, and in particular, breast cancer cell lines such as, for example, BT483, Hs578T, HTB2, BT20 and T47D, and normal mammary gland cell lines such as, for example, CRL7030 and Hs578Bst.

[0235] For long-term, high-yield production of recombinant proteins, stable expression is preferred. For example, cell lines which stably express the antibody molecule can be engineered. Rather than using expression vectors that contain viral origins of replication, host cells can be transformed with DNA controlled by appropriate expression control elements (e.g., promoters, enhancer sequences, transcription terminators, polyadenylation sites, etc.), and a selectable marker. Following the introduction of the foreign DNA, such genetically engineered cells can be allowed to grow for 1-2 days in an enriched medium, and then are typically replated in a selective medium. A selectable marker in the recombinant plasmid confers resistance to the selection and allows cells to stably integrate the plasmid into their chromosomes and grow to form foci which, in turn, can be cloned and expanded into cell lines. This method can advantageously be used to engineer cell lines expressing the antibody molecule. Such engineered cell lines are particularly useful in screening and evaluation of compounds that interact directly or indirectly with the antibody molecule.

[0236] A number of selection systems can be used, including but not limited to, herpes simplex virus thymidine kinase (HSV TK), (Wigler et al., 1977, Cell, 11:223), hypoxanthine-guanine phosphoribosyltransferase (HGPRT), (Szybalska and Szybalski, 1992, Proc. Natl. Acad. Sci. USA, 48:202), and adenine phosphoribosyltransferase (Lowy et al., 1980, Cell, 22:817) polynucleotides and polypeptides can be employed in tk-, hgprt-, or aprt-cells (APRT), respectively.

[0237] In addition, anti-metabolite resistance can be used as the basis of selection for the following polynucleotides and polypeptides: dhfr, which confers resistance to methotrexate (Wigler et al., 1980, Proc. Natl. Acad. Sci. USA, 77:357; and O'Hare et al., 1981, Proc. Natl. Acad. Sci. USA, 78:1527); gpt, which confers resistance to mycophenolic acid (Mulligan and Berg, 1981, Proc. Natl. Acad. Sci. USA, 18:2072); neo, which confers resistance to the aminoglycoside G418 (Clinical Pharmacy, 12:488-505; Wu and Wu, 1991, Biotherapy, 3:87-95; Tolstoshev, 1993, Ann. Rev. Pharmacol. Toxicol., 32:573-596; Mulligan, 1993, Science, 260:926-932; Anderson, 1993, Ann. Rev. Biochem, 62:191-21; May, 1993, TIB TECH, 11(5):155-215; and hygro, which confers resistance to hygromycin (Santerre et al., 1984, Gene, 30:147). Methods commonly known in the art of recombinant DNA technology can be routinely applied to select the desired recombinant clone, and such methods are described, for example, in Ausubel et al. (eds.), Current Protocols in Molecular Biology, John Wiley & Sons, NY (1993); Kriegler, 1990, Gene Transfer and Expression, A Laboratory Manual, Stockton Press, NY; in Chapters 12 and 13, Dracopoli et al. (eds), Current Protocols in Human Genetics, John Wiley & Sons, NY (1994); Colberre-Garapin et al., 1981. J. Mol. Biol., 150:1, which are incorporated by reference herein in their entireties.

[0238] The expression levels of an antibody molecule can be increased by vector amplification (for a review, see Bebbington and Hentscbel, The use of vectors based on gene amplification for the expression of cloned polynucleotides and polypeptides in mammalian cells in DNA cloning, Vol. 3. (Academic Press, New York, 1987). When a marker in the vector system expressing an antibody is amplifiable, an increase in the level of inhibitor present in the host cell culture will increase the number of copies of the marker gene. Since the amplified region is associated with the antibody gene, production of the antibody will also increase (Crouse et al., 1983, Mol. Cell. Biol., 3:257).

[0239] Vectors which use glutamine synthase (GS) or DHFR as the selectable markers can be amplified in the presence of the drugs methionine sulphoxirine or methotrexate, respectively. An advantage of glutamine synthase based vectors are the availability of cell lines (e.g., the murine myeloma cell line, NSO) which are glutamine synthase negative. Glutamine synthase expression systems can also function in glutamine synthase expressing cells (e.g. Chinese Hamster Ovary (CHO) cells) by providing additional inhibitor to prevent the functioning of the endogenous gene.

[0240] Vectors that express glutamine synthase as the selectable marker include, but are not limited to, the pEE6 expression vector described in Stephens and Cockett, 1989, Nucl. Acids. Res., 17:7110. A glutamine synthase expression system and components thereof are detailed in PCT publications: WO87/04462; WO86/05807; WO89/01036; WO89/10404; and WO91/06657 which are incorporated by reference herein in their entireties. In addition, glutamine synthase expression vectors that can be used in accordance with the present invention are commercially available from suppliers, including, for example, Lonza Biologics, Inc. (Portsmouth, N.H.). The expression and production of monoclonal antibodies using a GS expression system in murine myeloma cells is described in Bebbington et al., 1992, BioTechnology, 10:169 and in Biblia and Robinson, 1995, Biotechnol. Prog., 11:1, which are incorporated by reference herein in their entireties.

[0241] A host cell can be co-transfected with two expression vectors of the invention, the first vector encoding a heavy chain derived polypeptide and the second vector encoding a light chain derived polypeptide. The two vectors can contain identical selectable markers which enable equal expression of heavy and light chain polypeptides. Alternatively, a single vector can be used which encodes, and is capable of expressing, both the heavy and light chain polypeptides. In such situations, the light chain should be placed before the heavy chain to avoid an excess of toxic free heavy chain (Proudfoot, 1986, Nature, 322:52; Kohler, 1980, Proc. Natl. Acad. Sci. USA, 77:2197). The coding sequences for the heavy and light chains can comprise cDNA or genomic DNA.

[0242] Once an antibody molecule of the invention has been produced by an animal, chemically synthesized, or recombinantly expressed, it can be purified by any method known in the art for the purification of an immunoglobulin or polypeptide molecule, for example, by chromatography (e.g., ion exchange, affinity, particularly by affinity for the specific antigen, Protein A, and sizing column chromatography), centrifugation, differential solubility, or by any other standard technique for the purification of proteins. In addition, the antibodies of the present invention or fragments thereof can be fused to heterologous polypeptide sequences described herein or otherwise known in the art, to facilitate purification.

[0243] The present invention encompasses antibodies that are recombinantly fused or chemically conjugated (including both covalently and non-covalently conjugated) to a polypeptide (or portion thereof, preferably at least 10, 20, 30, 40, 50, 60, 70, 80, 90 or 100 amino acids of the polypeptide) of the present invention to generate fusion proteins. The fusion does not necessarily need to be direct, but can occur through linker sequences. The antibodies can be specific for antigens other than polypeptides (or portions thereof, preferably at least 10, 20, 30, 40, 50, 60, 70, 80, 90 or 100 amino acids of the polypeptide) of the present invention. For example, antibodies can be used to target the polypeptides of the present invention to particular cell types, either in vitro or in vivo, by fusing or conjugating the polypeptides of the present invention to antibodies specific for particular cell surface receptors.

[0244] Polypeptides and/or antibodies of the present invention (including fragments or variants thereof) can be fused to either the N-terminal or C-terminal end of the heterologous protein (e.g., immunoglobulin Fc polypeptide or human serum albumin polypeptide). Antibodies of the invention can also be fused to albumin (including, but not limited to, recombinant human serum albumin (see, e.g., U.S. Pat. No. 5,876,969, issued Mar. 2, 1999; EP Patent 0 413 622; and U.S. Pat. No. 5,766,883, issued Jun. 16, 1998, incorporated herein by reference in their entirety), resulting in chimeric polypeptides. In a preferred embodiment, polypeptides and/or antibodies of the present invention (including fragments or variants thereof) are fused with the mature form of human serum albumin (i.e., amino acids 1-585 of human serum albumin as shown in FIGS. 1 and 2 of EP Patent 0 322 094, which is herein incorporated by reference in its entirety). In another preferred embodiment, polypeptides and/or antibodies of the present invention (including fragments or variants thereof) are fused with polypeptide fragments comprising, or alternatively consisting of, amino acid residues 1-z of human serum albumin, where z is an integer from 369 to 419, as described in U.S. Pat. No. 5,766,883 incorporated herein by reference in its entirety.

[0245] Polynucleotides encoding src biomarker fusion proteins and antibodies thereto are also encompassed by the invention. Such fusion proteins may, for example, facilitate purification and may increase half-life in vivo. Antibodies fused or conjugated to the polypeptides of the present invention may also be used in in vitro immunoassays and purification methods using methods known in the art. See, e.g., Harbor et al., supra, and PCT publication WO 93/21232; EP 439, 095; Naramura et al., 1994, Immunol. Lett., 39:91-99; U.S. Pat. No. 5,474,981; Gillies et al., 1992, Proc. Natl. Acad. Sci USA, 89:1428-1432; Fell et al., 1991, J. Immunol., 146:2446-2452, which are incorporated by reference herein in their entireties.

[0246] The present invention further includes compositions comprising the src biomarker polypeptides of the present invention fused or conjugated to antibody domains other than the variable region domain. For example, the polypeptides of the present. invention can be fused or conjugated to an antibody Fc region, or portion thereof. The antibody portion fused to a polypeptide of the present invention can comprise the constant region, hinge region, CH1 domain, CH2 domain, CH3 domain, or any combination of whole domains or portions thereof. The polypeptides can also be fused or conjugated to the above antibody portions to form multimers. For example, Fc portions fused to the polypeptides of the present invention can form dimers through disulfide bonding between the Fc portions. Higher multimeric forms can be made by fusing the polypeptides to portions of IgA and IgM. Methods for fusing or conjugating the polypeptides of the present invention to antibody portions are known in the art. (See, e.g., U.S. Pat. Nos. 5,336,603; 5,622,929; 5,359,046; 5,349,053; 5,447,851; 5,112,946; EP 307,434; EP 367,166; PCT publications WO 96/04388; WO 91/06570; Ashkenazi et al., 1991, Proc. Natl. Acad. Sci. USA, 88:10535-10539; Zheng et al., 1995, J. Immunol., 154:5590-5600; and Vil et al., Proc. Natl. Acad. Sci. USA, 89:11337-11341, which are hereby incorporated by reference herein in their entireties).

[0247] As discussed supra, the polypeptides corresponding to a polypeptide, polypeptide fragment, or a variant of one or more of the src biomarker amino acid sequences as set forth in Tables 3-6 can be fused or conjugated to the above antibody portions to increase the in vivo half life of the polypeptides, or for use in immunoassays using methods known in the art. Further, the polypeptides corresponding to one or more of the src biomarker sequences as set forth in Tables 3-6 can be fused or conjugated to the above antibody portions to facilitate purification. For guidance, chimeric proteins having the first two domains of the human CD4 polypeptide and various domains of the constant regions of the heavy or light chains of mammalian immunoglobulins have been described. (EP 394,827; Traunecker et al., 1988, Nature, 331:84-86). The polypeptides of the present invention fused or conjugated to an antibody, or portion thereof, having disulfide-linked dimeric structures (due to the IgG), for example, can also be more efficient in binding and neutralizing other molecules, than the monomeric secreted protein or protein fragment alone. (Fountoulakis et al., 1995, J. Biochem., 270:3958-3964). In many cases, the Fc portion in a fusion protein is beneficial in therapy, diagnosis, and/or screening methods, and thus can result in, for example, improved pharmacokinetic properties. (EP A 232, 262). In drug discovery, for example, human proteins, such as hIL-5, have been fused with Fc portions for the purpose of high-throughput screening assays to identify antagonists of hIL-5. (See, Bennett et al., 1995, J. Molecular Recognition, 8:52-58; and Johanson et al., 1995, J. Biol. Chem., 270:9459-9471). Alternatively, deleting the Fc portion after the fusion protein has been expressed, detected, and purified, may be desired. For example, the Fc portion may hinder therapy and diagnosis if the fusion protein is used as an antigen for immunizations.

[0248] Moreover, the antibodies or fragments thereof of the present invention can be fused to marker sequences, such as a peptide, to facilitate their purification. In preferred embodiments, the marker amino acid sequence is a hexa-histidine peptide, such as the tag provided in a pQE vector (QIAGEN, Inc., Chatsworth, Calif.), among others, many of which are commercially available. As described in Gentz et al., 1989, Proc. Natl. Acad. Sci. USA, 86:821-824, for instance, hexa histidine provides for convenient purification of the fusion protein. Other peptide tags useful for purification include, but are not limited to, the “HA” tag, which corresponds to an epitope derived from the influenza hemagglutinin (HA) protein (Wilson et al., 1984, Cell, 37:767) and the “flag” tag.

[0249] The present invention further encompasses antibodies or fragments thereof conjugated to a diagnostic or therapeutic agent. The antibodies can be used diagnostically to, for example, monitor the development or progression of a tumor as part of a clinical testing procedure, for example, to determine the efficacy of a given treatment regimen. Detection can be facilitated by coupling the antibody to a detectable substance. Nonlimiting examples of detectable substances include various enzymes, prosthetic groups, fluorescent materials, luminescent materials, bioluminescent materials, radioactive materials, positron emitting metals using various positron emission tomographies, and nonradioactive paramagnetic metal ions. The detectable substance can be coupled or conjugated either directly to the antibody (or fragment thereof) or indirectly, through an intermediate (such as, for example, a linker known in the art) using techniques known in the art. (See, for example, U.S. Pat. No. 4,741,900 for metal ions which can be conjugated to antibodies for use as diagnostics according to the present invention).

[0250] Nonlimiting examples of suitable enzymes include horseradish peroxidase, alkaline phosphatase, beta-galactosidase, or acetylcholinesterase; Nonlimiting examples of suitable prosthetic group complexes include streptavidin/biotin and avidin/biotin; nonlimiting examples of suitable fluorescent materials include umbelliferone, fluorescein, fluorescein isothiocyanate, rhodamine, dichlorotriazinylamine fluorescein, dansyl chloride or phycoerythrin; a nonlimiting example of a luminescent material includes luminol; nonlimiting examples of bioluminescent materials include luciferase, luciferin, and aequorin; and nonlimiting examples of suitable radioactive material include iodine (¹²⁵I, ¹³¹I, carbon (¹⁴C), sulfur (3sus), tritium (³H), indium (¹¹¹In and other radioactive isotopes of inidium), technetium (⁹⁹Tc, ^{99m}Tc), thallium (20′Ti), gallium (⁶⁸Ga, ⁶⁷Ga), palladium (¹⁰³Pd), molybdenum (⁹⁹Mo), xenon (¹³³Xe), fluorine (¹⁹F), ¹⁵³Sm, ¹⁷⁷Lu, Gd, radioactive Pm, radioactive La, radioactive Yb, ¹⁶⁶Ho, ⁹⁰Y, radioactive Sc, radioactive Re, radioactive Re, ¹⁴²Pr, ¹⁰⁵Rh, and ⁹⁷Ru.

[0251] In specific embodiments, the src biomarker polypeptides of the invention are attached to macrocyclic chelators useful for conjugating radiometal ions, including, but not limited to, ¹¹¹In, ¹⁷⁷Lu, ⁹⁰Y, ¹⁶⁶Ho, and ¹⁵³Sm, to polypeptides. In a preferred embodiment, the radiometal ion associated with the macrocyclic chelators attached to the src biomarker polypeptides of the invention is ¹¹¹In. In another preferred embodiment, the radiometal ion associated with the macrocyclic chelator attached to the src biomarker polypeptides. of the invention is ⁹⁰Y. In specific embodiments, the macrocyclic chelator is 1, 4, 7, 10-tetraazacyclododecane-N, N′, N″, N′″-tetraacetic acid (DOTA). In other specific embodiments, the DOTA is attached to the src biomarker polypeptides of the invention via a linker molecule.

[0252] Examples of linker molecules useful for conjugating DOTA to a polypeptide are commonly known in the art. (See, for example, DeNardo et al., 1998, Clin. Cancer Res., 4(10):2483-90; Peterson et al., 1999, Bioconjug. Chem., 10(4):553-557; and Zimmerman et al, 1999, Nucl. Med. Biol., 26(8):943-950, which are hereby incorporated by reference in their entirety. In addition, U.S. Pat. Nos. 5,652,361 and 5,756,065, which disclose chelating agents that can be conjugated to antibodies and methods for making and using them, are hereby incorporated by reference in their entireties. Though U.S. Pat. Nos. 5,652,361 and 5,756,065 focus on conjugating chelating agents to antibodies, one skilled in the art can readily adapt the methods disclosed therein in order to conjugate chelating agents to other polypeptides.

[0253] Antibodies can also be attached to solid supports, which are particularly useful for immunoassays or purification of the target antigen. Such solid supports include, but are not limited to, glass, cellulose, polyacrylamide, nylon, polystyrene, polyvinyl chloride or polypropylene.

[0254] Techniques for conjugating therapeutic moieties to antibodies are well known, see, e.g., Arnon et al., “Monoclonal Antibodies For Immunotargeting Of Drugs In Cancer Therapy”, In: Monoclonal Antibodies And Cancer Therapy, Reisfeld et al. (eds.), pp. 243-56, Alan R. Liss, Inc., 1985; Hellstrom et al., “Antibodies For Drug Delivery”, In: Controlled Drug Delivery (2nd Ed.), Robinson et al. (eds.), pp. 623-53, Marcel Deldcer, Inc., 1987; Thorpe, “Antibody Carriers Of Cytotoxic Agents In Cancer Therapy: A Review”, In: Monoclonal Antibodies '84: Biological And Clinical Applications, Pinchera et al. (eds.), pp. 475-506, 1985; “Analysis, Results, And Future Prospective Of The Therapeutic Use Of Radiolabeled Antibody In Cancer Therapy”, In: Monoclonal Antibodies For Cancer Detection And Therapy, Baldwin et al. (eds.), pp. 303-316, Academic Press, 1985; and Thorpe et al., 1982, “The Preparation And Cytotoxic Properties Of Antibody-Toxin Conjugates”, Immunol. Rev., 62:119-158. Alternatively, an antibody can be conjugated to a second antibody to form an antibody heteroconjugate, e.g., as described in U.S. Pat. No. 4,676,980 to Segal, which is incorporated herein by reference in its entirety. An antibody, i.e., an antibody specific for a src biomarker polypeptide of this invention, with or without a therapeutic moiety conjugated to it, and administered alone or in combination with cytotoxic factor(s) and/or cytokine(s), can be used as a therapeutic.

[0255] The antibodies of the invention can be utilized for immunophenotyping of cell lines and biological samples. The translation product of the src biomarker-encoding polynucleotides and polypeptides of the present invention can be useful as cell specific marker(s), or more specifically, as cellular marker(s) that are differentially expressed at various stages of differentiation and/or maturation of particular cell types. Monoclonal antibodies directed against a specific epitope, or combination of epitopes, allow for the screening of cellular populations expressing the marker. Various techniques utilizing monoclonal antibodies can be employed to screen for cellular populations expressing the marker(s), including magnetic separation using antibody-coated magnetic beads, “panning” with antibody(ies) attached to a solid matrix (i.e., tissue culture plate), and flow cytometry (See, e.g., U.S. Pat. No. 5,985,660; and Morrison et al., 1999, Cell, 96:737-749).

[0256] These techniques allow for the screening of particular populations of cells, such as might be found with hematological malignancies (i.e. minimal residual disease (MRD) in acute leukemic patients) and “non-self” cells in transplantations to prevent Graft-versus-Host Disease (GVHD). Alternatively, these techniques allow for the screening of hematopoietic stem and progenitor cells capable of undergoing proliferation and/or differentiation, as might be found in human umbilical cord blood.

[0257] Antibodies according to this invention can be assayed for immunospecific binding by any method known in the art. The immunoassays which can be used include, but are not limited to, competitive and non-competitive assay systems using techniques such as BIAcore analysis, FACS (Fluorescence Activated Cell Sorter) analysis, immunofluorescence, immunocytochemistry, Western blots, radioimmunoassays, ELISA (enzyme linked immunosorbent assays), “sandwich” immunoassays, immunoprecipitation assays, precipitin reactions, gel diffusion precipitin reactions, immunodiffusion assays, agglutination assays, complement fixation assays, immunoradiometric assays, fluorescent immunoassays, protein A immunoassays, to name but a few. Such assays are routine and well known and practiced in the art (see, e.g., Ausubel et al, eds, 1994, Current Protocols in Molecular Biology, Vol. 1, John Wiley & Sons, Inc., New York, which is incorporated by reference herein in its entirety). Nonlimiting, exemplary immunoassays are described briefly below.

[0258] Immunoprecipitation protocols generally comprise lysing a population of cells in a lysis buffer such as RIPA buffer (i.e., 1% NP40 or Triton X-100, 1% sodium deoxycholate, 0.1% SDS, 0.15 M NaCl, 0.01 M sodium phosphate at pH 7.2, 1% Trasylol) supplemented with protein phosphatase and/or protease inhibitors (e.g., EDTA, PMSF, aprotinin, sodium vanadate); adding the antibody of interest to the cell lysate; incubating for a period of time (e.g., 1 to 4 hours) at 4° C.; adding protein A and/or protein G sepharose beads to the cell lysate; incubating for about 60 minutes or more at 4° C.; washing the beads in lysis buffer; and resuspending the beads in SDS/sample buffer. The ability of the antibody of interest to immunoprecipitate a particular antigen can be assessed by, for example, Western blot analysis. One of skill in the art would be knowledgeable as to the parameters that can be modified to increase the binding of the antibody to an antigen and decrease the background (e.g., pre-clearing the cell lysate with sepharose beads). For further discussion regarding immunoprecipitation protocols, see, e.g., Ausubel et al, eds, 1994, Current Protocols in Molecular Biology, Vol. 1, John Wiley & Sons, Inc., New York, at 10.16.1.

[0259] Western blot analysis generally comprises preparing protein samples; electrophoresis of the protein samples in a polyacrylamide gel (e.g., 8%-20% SDS PAGE depending on the molecular weight of the antigen); transferring the protein sample from the polyacrylamide gel to a membrane such as nitrocellulose, PVDF or nylon; blocking the membrane in blocking solution (e.g., PBS with 3% BSA or nonfat milk); washing the membrane in washing buffer (e.g., PBS-Tween 20); blocking the membrane with primary antibody (the antibody of interest) diluted in blocking buffer; washing the membrane in washing buffer; blocking the membrane with a secondary antibody (which recognizes the primary antibody, e.g., an anti-human antibody) conjugated to an enzymatic substrate (e.g., horseradish peroxidase or alkaline phosphatase) or radioactive molecule (e.g., ³²P or ¹²⁵I) diluted in blocking buffer; washing the membrane in wash buffer; and detecting the presence of the antigen. One of skill in the art would be knowledgeable as to the parameters that can be modified to increase the signal detected and to reduce the background noise. For further discussion regarding Western blot protocols, see, e.g., Ausubel et al, eds, 1994, Current Protocols in Molecular Biology, Vol. 1, John Wiley & Sons, Inc., New York, at 10.8.1.

[0260] ELISAs comprise preparing antigen; coating the wells of a 96 well microtiter plate with antigen; adding to the wells the antibody of interest conjugated to a detectable compound such as an enzymatic substrate (e.g., horseradish peroxidase or alkaline phosphatase); incubating for a period of time; and detecting the presence of the antigen. In ELISAs, the antibody of interest does not have to be conjugated to a detectable compound; instead, a second antibody (which recognizes the antibody of interest) conjugated to a detectable compound can be added to the wells. Further, instead of coating the wells with antigen, the antibody can be first coated onto the well. In this case, a second antibody conjugated to a detectable compound can be added to the antibody-coated wells following the addition of the antigen of interest. One of skill in the art would be knowledgeable as to the parameters that can be modified to increase the signal detected, as well as other variations of ELISAs known in the art. For further discussion regarding ELISAs, see, e.g., Ausubel et al, eds, 1994, Current Protocols in Molecular Biology, Vol. 1, John Wiley & Sons, Inc., New York, at 11.2.1.

[0261] The binding affinity of an antibody to an antigen and the off-rate of an antibody-antigen interaction can be determined by competitive binding assays. One example of a competitive binding assay is a radioimmunoassay involving the incubation of labeled antigen (e.g., ³H or ¹²⁵I), or a fragment or variant thereof, with the antibody of interest in the presence of increasing amounts of labeled antigen, and the detection of the antibody bound to the labeled antigen. The affinity of the antibody of interest for a src biomarker protein and the binding off rates can be determined from the data by Scatchard plot analysis. Competition with a second antibody can also be determined using radioimmunoassays. In this case, the src biomarker protein is incubated with antibody of interest conjugated to a labeled compound (e.g., a compound labeled with ³H or ¹²⁵I) in the presence of increasing amounts of an unlabeled second antibody. This kind of competitive assay between two antibodies, may also be used to determine if two antibodies bind to the same or different epitopes.

[0262] In a preferred embodiment, BIAcore kinetic analysis is used to determine the binding on and off rates of antibodies (including antibody fragments or variants thereof) to a src biomarker protein, or fragments of a src biomarker protein. Kinetic analysis comprises analyzing the binding and dissociation of antibodies from chips with immobilized src biomarker protein on the chip surface.

[0263] It is to be further understood that the above-described techniques for the production, expression, isolation, and manipulation of antibody molecules, for example, by recombinant techniques involving molecular biology, as well as by other techniques related to the analysis of polynucleotides and polypeptides and proteins, are applicable to other polypeptide or peptide molecules of the invention as described herein, in particular, the src biomarker polypeptides or peptides themselves, as applicable or warranted in accordance with the various embodiments of this invention.

[0264] The present invention also embraces a kit for determining or predicting drug susceptibility or resistance by a patient having a disease, particularly a cancer or tumor, preferably, a colon cancer or tumor. Such kits are useful in a clinical setting for use in testing patient's biopsied tumor or cancer samples, for example, to determine or predict if the patient's tumor or cancer will be resistant or sensitive to a given treatment or therapy with a drug, compound, chemotherapy agent, or biological treatment agent. Provided in the kit are the predictor set comprising those polynucleotides and polypeptides correlating with resistance and sensitivity to src or src family tyrosine kinases modulators in a particular biological system, particularly src kinase inhibitors, and preferably comprising a microarray; and, in suitable containers, the modulator compounds for use in testing a cells from patient tissue or patient samples for resistance/sensitivity; and instructions for use. Such kits encompass predictor set comprising those polynucleotides and polypeptides correlating with resistance and sensitivity to modulators of protein tyrosine kinases including members of the Src family of tyrosine kinases, for example, Src, Fgr, Fyn, Yes, Blk, Hck, Lck and Lyn, as well as other protein tyrosine kinases, including, Bcr-abl, Jak, PDGFR, c-kit and Ephr,

[0265] Also, as explained above, the kit is not limited to microarrays, but can encompass a variety of methods and systems by which the expression of the predictor/marker polynucleotides and polypeptides can be assayed and/or monitored, both at the level of mRNA and of protein, for example, via PCR assays, e.g., RT-PCR and immunoassay, such as ELISA. In kits for performing PCR, or in situ hybridization, for example, nucleic acid primers or probes from the sequences of one or more of the predictor polynucleotides and polypeptides, such as those described in Tables 3-6 and 13, are supplied, in addition to buffers and reagents as necessary for performing the method, and instructions for use. In kits for performing immunoassays, e.g. ELISAs, immunoblotting assays, and the like, antibodies, or bindable portions thereof, to the src biomarker polypeptides of the invention, or to antigenic or immunogenic peptides thereof, are supplied, in addition to buffers and reagents as necessary for performing the method, and instructions for use.

[0266] In another embodiment, the present invention embraces the use of one or more polynucleotides and polypeptides among those of the predictor polynucleotides and polypeptides identified herein that can serve as targets for the development of drug therapies for disease treatment. Such targets may be particularly applicable to treatment of colon disease, such as colon cancers or tumors. Indeed, because these predictor polynucleotides and polypeptides are differently expressed in sensitive and resistant cells, their expression pattern is correlated with relative intrinsic sensitivity of cells to treatment with compounds that interact with and inhibit src tyrosine kinases. Accordingly, the polynucleotides and polypeptides highly expressed in resistant cells may serve as targets for the development of drug therapies for the tumors which are resistant to src tyrosine kinase inhibitor compounds.

### EXAMPLES

[0267] The Examples herein are meant to exemplify the various aspects of carrying out the invention and are not intended to limit the scope of the invention in any way. The Examples do not include detailed descriptions for conventional methods employed, such as in the construction of vectors, the insertion of cDNA into such vectors, or the introduction of the resulting vectors into the appropriate host. Such methods are well known to those skilled in the art and are described in numerous publications, for example, Sambrook, Fritsch, and Maniatis, Molecular Cloning: A Laboratory Manual, 2^{nd} Edition, Cold Spring Harbor Laboratory Press, USA, (1989).

### Example 1

### Methods

### IC₅₀ Determination—In Vitro Cytotoxicity Assay

[0268] Src tyrosine kinase inhibitor compounds (described in WO 00/62778, published Oct. 26, 2000) were tested for cytotoxicity in vitro against a panel of thirty-one human colon cell lines available from the American Type Culture Collection, ATCC, except CX-1 and MIP, which were obtained from academic investigators. Cytotoxicity was assessed in cells by the MTS (3-(4,5-dimethylthiazol-2-yl)-5-(3-carboxymethoxyphenyl)2-(4-sulphenyl)-2H-tetrazolium, inner salt) assay (T. L. Riss et al., 1992, Mol. Biol. Cell, 3 (Suppl.): 184a).

[0269] To carry out the assays, the colon cells were plated at 4,000 cells/well in 96 well microtiter plates and 24 hours later serial diluted drugs were added. The concentration range for the src compounds used in the cytotoxicity assay was from 5 μg/ml to 0.0016 μg/ml (roughly 10 μM to 0.0032 μM). The cells were incubated at 37° C. for 72 hours at which time the tetrazolium dye, MTS (333 μg/ml final concentration), in combination with the electron coupling agent phenazine methosulfate (25 μM final concentration), was added. A dehydrogenase enzyme in live cells reduces the MTS to a form that absorbs light at 492 nM that can be quantified spectrophotometrically. The greater the absorbency the greater the number of live cells. The results are expressed as an IC₅₀, which is the drug concentration required to inhibit cell proliferation (i.e. absorbance at 450 nM) to 50% of that of untreated control cells. The mean IC₅₀ and standard deviation (SD) from multiple tests for each cell line were calculated.

### Resistant/Sensitive Classification

[0270] For each compound, the IC₅₀ for each cell line was log-transformed to log₁₀(IC₅₀), and the log₁₀(IC₅₀) values were then normalized across the 31 colon cell lines. The cell lines with log₁₀(IC₅₀) below the mean log₁₀(IC₅₀) of all 31 cell lines were defined as sensitive to the compound, while those with log₁₀(IC₅₀) above the mean log₁₀(IC₅₀) were considered to be resistant to the compound. The classification of the thirty-one colon cell lines was performed for all four of the src kinase inhibitor compounds. (Table 2).Gene expression profiling

[0271] The colon cells were grown to 50-70% confluence, and RNA was isolated using the RNeasy™ kits (Qiagen, Valencia, Calif.). The quality of the RNA was assessed by measuring the 28s:18s ribosomal RNA ratio by using an Agilent 2100 bioanalyzer (Agilent Technologies, Rockville, Md.). The concentration of total RNA was determined spectrophotometrically. 10 μg of total RNA from each cell line was used to prepare biotinylated probe according to the Affymetrix Manual (Affymetrix Genechip® Technical Manual, 2000). Probes were hybridized to Affymetrix human genome U95Av2 high density oligonucleotide arrays (Affymetrix, Santa Clara, Calif.). The arrays were then washed and stained using the GeneChip® Fluidics station according to the manufacture's instructions (Affymetrix Genechip® Technical Manual, 2000). The HG-U95Av2 array contains approximately 12,000 probe sets which represent approximately 12,000 human gene sequences and ESTs.

### Preprocessing of Microarray Data

[0272] Scanned image files were visually inspected for artifacts and analyzed with GeneChip® Expression Analysis software (Affymetrix, Santa Clara, Calif.). The “Absolute Call” (Affymetrix Genechip® Technical Manual, 2000) which is used to determine whether a transcript is detected within one sample, as well as the “Average Difference” (Affymetrix Genechip® Technical Manual, 2000), which serves as a relative indicator of the level of expression of a transcript, were calculated. The hybridization intensity for each sample was scaled to 1,500 (Affymetrix Genechip® Technical Manual, 2000) in order to account for any minor differences in global chip intensity, so that the overall expression level for each cell line was comparable. Affymetrix control sequences were removed prior to analysis.

[0273] Of a total of 12,558 represented polynucleotides and polypeptides on the HG-U9SAv2 array, 2079 represented polynucleotides and polypeptides were not detected (Absent Call) across all of the thirty-one colon cell lines using the Affymetrix GeneChip® Expression Analysis algorithm; these undetected polynucleotides and polypeptides were excluded from further analysis. The remaining data were transferred to the GeneCluster software (Whitehead Institute; T. R. Golub et al., 1999, Science, 286:531-537). A threshold filter was applied to the gene expression values of the remaining 10,479 represented polynucleotides and polypeptides to remove negative gene expression values and to limit high gene expression values that were not likely to be in the linear range of the Affymetrix fluorescent scanner. The threshold filter converted all gene expression values that were negative, or below 100 units, to 100 units, and all gene expression values that were above 40,000 units to 40,000 units. All represented polynucleotides and polypeptides whose gene expression values were between 100 and 40,000 were not changed.

[0274] A second “variation filter” was then applied to the data set to find polynucleotides and polypeptides that were likely to correlate with different properties and features of the panel of thirty-one cell lines. The object of the second filter is to select those polynucleotides and polypeptides whose expression pattern varies across the data set; a gene that does not vary can not provide information about differing properties of the thirty-one cell line panel. For example, if there are two populations of cells within the data set, i.e., fast growing cells and slow growing cells, then a gene whose expression is constant, or whose expression does not change substantially, can not yield information that would correlate to fast or slow cell growth.

[0275] The second variation filter was formulated to determine the expression pattern of each gene across the thirty-one cell lines and find polynucleotides and polypeptides that passed the following criteria:
[0276] 1. The gene must show a three-fold change in absolute expression, i.e., as depicted in the formula:

$$\frac{expression value in any give cell line}{expression value in any other cell line} > 3 or < 0.33$$
[0277] 2. In addition to 1, the three-fold change must represent an absolute difference of 1000 expression units.
[0278] 3. In addition, the criteria in #1 and #2 above must be met on three independent occasions within the data set, i.e., Cell line A/B, Cell line E/F and Cell line T/G. (The algorithm does not use a single expression value for one cell line on multiple occasions, i.e., Cell Line A/B, Cell line A/F and Cell line B/F).

[0279] The second variation filter reduced the data set to 3008 polynucleotides and polypeptides.

[0280] After the second variation filter was applied, each gene was normalized to the mean across all the thirty-one colon cell samples (with the mean set to 0 and standard deviation set to 1) using the following formula:

$$\frac{\begin{matrix}Expresssion value gene “ Z ” - \\ mean expresssion value of gene “ Z ” in the 31 cell lines\end{matrix}}{\begin{matrix}Standard deviation of expression \\ value for gene “ Z ” in the 31 cell lines \end{matrix}}$$

[0281] This normalized data set was used to select polynucleotides and polypeptides which significantly correlated with the property of sensitivity toward a drug class as described herein.

### Example 2

### PCR Expression Profiling

[0282] RNA quantification is performed using the Taqman® real-time-PCR fluorogenic assay. The Taqman® assay is one of the most precise methods for assaying the concentration of nucleic acid templates.

[0283] All cell lines are grown using standard cell culture conditions: RPMI 1640 supplemented to contain 10% fetal bovine serum, 100 IU/ml penicillin, 100 mg/ml streptomycin, 2 mM L-glutamine and 10 mM Hepes (all from GibcoBRL, Rockville, Md.). Eighty percent confluent cells are washed twice with phosphate-buffered saline (GibcoBRL) and harvested using 0.25% trypsin (GibcoBRL). RNA is prepared using standard methods, preferably, employing the RNeasy Kit commercially available from Qiagen (Valencia, Calif.).

[0284] cDNA template for real-time PCR can be generated using the Superscript™ First Strand Synthesis system for RT-PCR. Representative forward and reverse RT-PCT primers for each of the src biomarker polynucleotides and polypeptides of the present invention are provided in Tables 13 herein.

[0285] SYBR Green real-time PCR reactions are prepared as follows: The reaction mix contains 20 ng first strand cDNA; 50 nM Forward Primer (one or more primers selected from SEQ ID NO:391 to 591); 50 nM Reverse Primer (one or more primers selected from SEQ ID NO:592 to 792); 0.75×SYBR Green I (Sigma); 1×SYBR Green PCR Buffer (50 mMTris-HCl pH 8.3, 75 mM KCl); 10% DMSO; 3 nM MgCl₂; 300 μM each dATP, dGTP, dTTP, dCTP; 1 U Platinum® Taq DNA Polymerase High Fidelity (Cat# 11304029; Life Technologies; Rockville, Md.), 1:50 dilution; ROX (Life Technologies).

[0286] Real-time PCR is performed using an Applied Biosystems 5700 Sequence Detection System. Conditions are 95° C. for 10 minutes (denaturation and activation of Platinum® Taq DNA Polymerase), 40 cycles of PCR (95° C. for 15 seconds, 60° C. for 1 minute). PCR products are analyzed for uniform melting using an analysis algorithm built into the 5700 Sequence Detection System.

[0287] cDNA quantification used in the normalization of template quantity is performed using Taqman® technology. Taqman® reactions are prepared as follows: The reaction mix comprises 20 ng first strand cDNA; 25 nM GAPDH-F3, Forward Primer, 250 nM GAPDH-R1 Reverse Primer; 200 nM GAPDH-PVIC Taqman® Probe (fluorescent dye labeled oligbnucleotide primer); 1× Buffer A (Applied Biosystems); 5.5 mM MgCl₂; 300 μM DATP, dGTP, dTTP, dCTP; 1 U Amplitaq Gold (Applied Biosystems). GAPDH, D-glyceraldehyde-3-phosphate dehydrogenase, is used as a control to normalize mRNA levels.

[0288] Real-time PCR is performed using an Applied Biosystems 7700 Sequence Detection System. Conditions are 95° C. for 10 minutes (denaturation and activation of Amplitaq Gold), 40 cycles of PCR (95° C. for 15 seconds, 60° C. for 1 minute).

[0289] The sequences for the GAPDH oligonucleotides used in the Taqman® reactions are as follows:

| | |
|---|---|
| GAPDH-F3: | |
| 5′-AGCCGAGCCACATCGCT-3′ | (SEQ ID NO: 793) |
| GAPDH-R1: | |
| 5′-GTGACCAGGCGCCCAATAC-3′ | (SEQ ID NO: 794) |
| GAPDH-PVIC | |
| CAAATCCGTTGACTCCGACCTTCACCTT-3′ | (SEQ ID NO: 795) |
| TAMRA. | |

Taqman® Probe -VIC-5′-

[0290] The Sequence Detection System generates a Ct (threshold cycle) value that is used to calculate a concentration for each input cDNA template. cDNA levels for each gene of interest are normalized to GAPDH cDNA levels to compensate for variations in total cDNA quantity in the input sample. This is done by generating GAPDH Ct values for each cell line. Ct values for the gene of interest and GAPDH are inserted into a modified version of the δδCt equation (Applied Biosystems Prism® 7700 Sequence Detection System User Bulletin #2), which is used to calculate a GAPDH normalized relative cDNA level for each specific cDNA. The δδCt equation is as follows: relative quantity of nucleic acid template=2^{δδCt}=2^{(δCta-δCtb)}, where δCta=Ct target−Ct GAPDH, and δCtb=Ct reference−Ct GAPDH. (No reference cell line is used for the calculation of relative quantity; δCtb is defined as 21).

### Example 3

### Production of an Antibody Directed Against Src Biomarker Polypeptides

[0291] Anti-src biomarker polypeptide antibodies of the present invention can be prepared by a variety of methods. As one example of an antibody-production method, cells expressing a polypeptide of the present invention are administered to an animal to induce the production of sera containing polyclonal antibodies directed to the expressed polypeptides. In a preferred method, the expressed protein is prepared, preferably isolated and purified, to render it substantially free of natural contaminants, using techniques commonly practiced in the art. Such a preparation is then introduced into an animal in order to produce polyclonal antisera of greater specific activity for the expressed and isolated polypeptide.

[0292] In a most preferred method, the antibodies of the present invention are monoclonal antibodies (or protein binding fragments thereof) and can be prepared using hybridoma technology as detailed hereinabove. Cells expressing the polypeptide can be cultured in any suitable tissue culture medium; however, it is preferable to culture cells in Earle's modified Eagle's medium supplemented to contain 10% fetal bovine serum (inactivated at about 56° C.), and supplemented to contain about 10 g/l nonessential amino acids, about 1,000 U/ml penicillin, and about 100 μg/ml streptomycin.

[0293] The splenocytes of immunized (and boosted) mice are extracted and fused with a suitable myeloma cell line. Any suitable myeloma cell line can be employed in accordance with the present invention; however, it is preferable to employ the parent myeloma cell line (SP2/0), available from the ATCC. After fusion, the resulting hybridoma cells are selectively maintained in HAT medium, and then cloned by limiting dilution as described by Wands et al. (1981, Gastroenterology, 80:225-232). The hybridoma cells obtained through such a selection are then assayed to identify those cell clones that secrete antibodies capable of binding to the polypeptide immunogen, or a portion thereof.

[0294] Alternatively, additional antibodies capable of binding to the polypeptide can be produced in a two-step procedure using anti-idiotypic antibodies. Such a method makes use of the fact that antibodies are themselves antigens, and therefore, it is possible to obtain an antibody that binds to a second antibody. In accordance with this method, protein specific antibodies are used to immunize an animal, preferably a mouse. The splenocytes of such an immunized animal are then used to produce hybridoma cells, and the hybridoma cells are screened to identify clones that produce an antibody whose ability to bind to the protein-specific antibody can be blocked by the polypeptide. Such antibodies comprise anti-idiotypic antibodies to the protein-specific antibody and can be used to immunize an animal to induce the formation of further protein-specific antibodies.

[0295] For in vivo use of antibodies in humans, it may be preferable to use “humanized” chimeric monoclonal antibodies. Such antibodies can be produced using genetic constructs derived from hybridoma cells producing the monoclonal antibodies described above. Methods for producing chimeric antibodies are known and practiced in the art. (See, e.g., for review, Morrison, 1985, Science, 229:1202); Oi et al., 1986, BioTechniques, 4:214; Cabilly et al., U.S. Pat. No. 4,816,567; Taniguchi et al., EP 171496; Morrison et al., EP 173494; Neuberger et al., WO 8601533; Robinson et al., WO 8702671; Boulianne et al., 1984, Nature, 312:643; and Neuberger et al., 1985, Nature, 314:268).

### Example 4

### Immunofluorescence Assays

[0296] The following immunofluorescence protocol may be used, for example, to verify src biomarker protein expression on cells, or, for example, to check for the presence of one or more antibodies that bind src biomarker protein expressed on the surface of cells. Briefly, Lab-Tek II chamber slides are coated overnight at 4° C. with 10 micrograms/milliliter (μg/ml) of bovine collagen Type II in DPBS containing calcium and magnesium (DPBS++). The slides are then washed twice with cold DPBS++ and seeded with 8000 CHO—CCR5 or CHO pC4 transfected cells in a total volume of 125 μl and incubated at 37° C. in the presence of 95% oxygen/5% carbon dioxide.

[0297] The culture medium is gently removed by aspiration and the adherent cells are washed twice with DPBS++ at ambient temperature. The slides are blocked with DPBS++ containing 0.2% BSA (blocker) at 0-4° C. for one hour. The blocking solution is gently removed by aspiration, and 125 μl of antibody containing solution (an antibody containing solution may be, for example, a hybridoma culture supernatant which is usually used undiluted, or serum/plasma which is usually diluted, e.g., a dilution of about 1/100 dilution). The slides are incubated for 1 hour at 0-4° C. Antibody solutions are then gently removed by aspiration and the cells are washed 5 times with 400 μl of ice cold blocking solution. Next, 125 μl of 1 μg/ml rhodamine labeled secondary antibody (e.g., anti-human IgG) in blocker solution is added to the cells. Again, cells are incubated for 1 hour at 04° C.

[0298] The secondary antibody solution is then gently removed by aspiration and the cells are washed 3 times with 400 μl of ice cold blocking solution, and 5 times with cold DPBS++. The cells are then fixed with 125 μl of 3.7% formaldehyde in DPBS++for 15 minutes at ambient temperature. Thereafter, the cells are washed 5 times with 400 μl of DPBS++ at ambient temperature. Finally, the cells are mounted in 50% aqueous glycerol, and viewed in a fluorescence microscope using rhodamine filters.

### BRIEF DESCRIPTION OF THE SEQUENCE LISTING

[0299] Incorporated herein by reference in its entirety is a Sequence Listing, including SEQ ID NO:1 through SEQ ID NO:390, which include nucleic acid and amino acid sequences of the src biomarkers as presented in Tables 3-6 herein. The Sequence Listing also contains representative primer pairs that may be used in RT-PCR assays for any of the predictor polynucleotides and polypeptides of the present invention, including SEQ ID NO:391 through SEQ ID NO:792.

TABLE 1

| | Mean IC50 | | Mean IC50 | | Mean IC50 | | Mean IC50 | |
|---|---|---|---|---|---|---|---|---|
| Cell Lines | (uM) | +/− SD | (uM) | +/− SD | (uM) | +/− SD | (uM) | +/− SD |
| WiDr | 0.041 | 0.015 | 0.007 | 0.004 | 0.185 | 0.096 | 0.040 | 0.010 |
| HT-29 | 0.042 | 0.023 | 0.038 | 0.023 | 0.489 | 0.204 | 0.082 | 0.044 |
| LoVo | 0.055 | 0.041 | 0.005 | 0.002 | 1.723 | 1.496 | 0.028 | 0.016 |
| HCT-15 | 0.153 | 0.066 | 0.326 | 0.095 | 3.409 | 1.418 | 0.221 | 0.029 |
| CCD-18Co | 0.215 | 0.247 | 0.028 | 0.043 | 1.955 | 1.611 | 0.099 | 0.111 |
| Caco-2 | 0.233 | 0.099 | 0.538 | 0.344 | 0.429 | 0.108 | 0.295 | 0.074 |
| CCD-33Co | 0.311 | 0.221 | 0.124 | 0.178 | 1.068 | 0.745 | 0.241 | 0.079 |
| LS174T | 0.505 | 0.199 | 0.060 | 0.039 | 2.279 | 1.354 | 0.356 | 0.191 |
| SW1417 | 0.505 | 0.476 | 0.021 | 0.028 | 0.187 | 0.246 | 0.096 | 0.081 |
| SW837 | 3.318 | 1.276 | 3.985 | 3.055 | 0.460 | 0.263 | 2.110 | 1.588 |
| DLD-1 | 4.506 | 1.002 | 2.121 | 1.613 | 6.272 | 3.415 | 2.545 | 1.709 |
| RKO-RM13 | 4.686 | 1.917 | 2.761 | 0.454 | 3.296 | 0.749 | 5.552 | 1.647 |
| MIP | 6.548 | 2.311 | 5.822 | 1.294 | 10.565 | 1.557 | 6.097 | 3.398 |
| CX-1 | 7.801 | 3.677 | 7.925 | 3.886 | 2.517 | 1.225 | 7.691 | 1.287 |
| HCT116-S542 | 8.726 | 2.109 | 8.353 | 0.286 | 11.261 | 0.000 | 7.799 | 3.225 |
| SK-CO-1 | 9.533 | 0.398 | 9.912 | 0.000 | 9.038 | 4.446 | 8.900 | 0.000 |
| Colo201 | 9.814 | 0.000 | 7.008 | 1.500 | 7.120 | 1.755 | 6.972 | 2.832 |
| Colo205 | 9.814 | 0.000 | 7.952 | 2.414 | 4.374 | 1.613 | 4.891 | 2.474 |
| Colo320DM | 9.814 | 0.000 | 9.912 | 0.000 | 11.261 | 0.000 | 8.926 | 0.000 |
| HCT116 | 9.814 | 0.000 | 7.903 | 2.422 | 11.261 | 0.000 | 8.926 | 0.000 |
| HCT-8 | 9.814 | 0.000 | 5.362 | 3.142 | 7.743 | 3.991 | 7.312 | 1.974 |
| SW403 | 9.814 | 0.000 | 0.123 | 0.171 | 0.206 | 0.185 | 7.868 | 1.937 |
| SW480 | 9.814 | 0.000 | 7.286 | 2.893 | 11.261 | 0.000 | 8.926 | 0.000 |
| SW620 | 9.814 | 0.000 | 7.622 | 0.827 | 11.261 | 0.000 | 8.926 | 0.000 |
| T84 | 9.814 | 0.000 | 0.682 | 0.492 | 0.715 | 0.238 | 4.994 | 3.406 |
| Colo 320HSR | 10.571 | 0.000 | 10.684 | 0.000 | 11.261 | 0.000 | 9.524 | 0.000 |
| LS1034 | 10.571 | 0.000 | 10.684 | 0.000 | 11.261 | 0.000 | 9.524 | 0.000 |
| LS180 | 10.571 | 0.000 | 1.890 | 0.620 | 11.261 | 0.000 | 2.558 | 0.544 |
| LS513 | 10.571 | 0.000 | 2.254 | 1.283 | 11.261 | 0.000 | 9.524 | 0.000 |
| SW1116 | 10.571 | 0.000 | 1.831 | 0.923 | 11.261 | 0.000 | 9.524 | 0.000 |
| SW948 | 10.571 | 0.000 | 1.756 | 1.007 | 11.261 | 0.000 | 9.524 | 0.000 |

[0300] TABLE 2

| Cell Lines | BMS-A | BMS-B | BMS-C | BMS-D |
|---|---|---|---|---|
| WiDr | S | S | S | S |
| HT-29 | S | S | S | S |
| LoVo | S | S | S | S |
| CCD-18Co | S | S | S | S |
| Caco-2 | S | S | S | S |
| CCD-33Co | S | S | S | S |
| LS174T | S | S | S | S |
| SW1417 | S | S | S | S |
| HCT-15 | S | S | R | S |
| T84 | R | S | S | R |
| SW403 | R | S | S | R |
| SW837 | R | R | S | R |
| CX-1 | R | R | S | R |
| DLD-1 | R | R | R | R |
| RKO-RM13 | R | R | R | R |
| MIP | R | R | R | R |
| HCT116-S542 | R | R | R | R |
| SK-CO-1 | R | R | R | R |
| Colo201 | R | R | R | R |
| Colo205 | R | R | R | R |
| Colo320DM | R | R | R | R |
| HCT116 | R | R | R | R |
| HCT-8 | R | R | R | R |
| SW480 | R | R | R | R |
| SW620 | R | R | R | R |
| Colo 320HSR | R | R | R | R |
| LS1034 | R | R | R | R |
| LS180 | R | R | R | R |
| LS513 | R | R | R | R |
| SW1116 | R | R | R | R |
| SW948 | R | R | R | R |

[0301] TABLE 3

| | | Common to all | | | | | | |
|---|---|---|---|---|---|---|---|---|
| | | 4 BMS | | | | | | |
| | Highly | compounds | | | | | | SEQ ID |
| | Expressed | (BMS-A, BMS- | Common to | Common to | | | SEQ ID | NO: of |
| | Cells (Sensitive | B, BMS-C, | BMS-B | BMS-C | Genbank | | NO: of | Amino |
| Gene # | or Resistent) | BMS-D) | Compound | Compound | Accession # | UniGene Title | DNA | Acid |
| 1 | Sensitive cells | yes | | | AB014558 | cryptochrome 2 (photolyase-like) | 1 | 202 |
| 2 | Sensitive cells | yes | | | NM_006979 | HLA class II region expressed gene | 2 | 203 |
| | | | | | | KE4 | | |
| 3 | Sensitive cells | yes | | | M22489 | bone morphogenetic protein 2 | 3 | 204 |
| 4 | Sensitive cells | yes | | | AB023194 | KIAA0977 protein | 4 | 205 |
| 5 | Sensitive cells | yes | | | U03688 | cytochrome P450, subfamily I | 5 | 206 |
| | | | | | | (dioxin-inducible), polypeptide 1 | | |
| | | | | | | (glaucoma 3, primary infantile) | | |
| 6 | Sensitive cells | yes | | | M88458 | KDEL (Lys-Asp-Glu-Leu) | 6 | 207 |
| | | | | | | endoplasmic reticulum protein | | |
| | | | | | | retention receptor 2 | | |
| 7 | Sensitive cells | yes | | | L13463 | regulator of G-protein signalling 2, | 7 | 208 |
| | | | | | | 24 kD | | |
| 8 | Sensitive cells | | yes | | U21551 | branched chain aminotransferase 1, | 8 | 209 |
| | | | | | | cytosolic | | |
| 9 | Sensitive cells | yes | | | AF000560 | Homo sapiens TTF-I interacting | 9 | 210 |
| | | | | | | peptide 20 mRNA, partial cds | | |
| 10 | Sensitive cells | | | | AF102265 | N-acetylglucosamine-phosphate | 10 | 211 |
| | | | | | | mutase | | |
| 11 | Sensitive cells | | | yes | X06272 | signal recognition particle receptor | 11 | 212 |
| | | | | | | (‘docking protein’) | | |
| 12 | Sensitive cells | yes | | | L40802 | hydroxysteroid (17-beta) | 12 | 213 |
| | | | | | | dehydrogenase 2 | | |
| 13 | Sensitive cells | yes | | | X13916 | low density lipoprotein-related | 13 | 214 |
| | | | | | | protein 1 (alpha-2-macroglobulin | | |
| | | | | | | receptor) | | |
| 14 | Sensitive cells | yes | | | AF009674 | axin | 14 | 215 |
| 15 | Sensitive cells | yes | | | M73077 | glucocorticoid receptor DNA | 15 | 216 |
| | | | | | | binding factor 1 | | |
| 16 | Sensitive cells | yes | | | U15655 | Ets2 repressor factor | 16 | 217 |
| 17 | Sensitive cells | | | | AB014520 | KIAA0620 protein | 17 | 218 |
| 18 | Sensitive cells | yes | | | M58603 | nuclear factor of kappa light | 18 | 219 |
| | | | | | | polypeptide gene enhancer in B- | | |
| | | | | | | cells I (p105) | | |
| 19 | Sensitive cells | | | | X76104 | death-associated protein kinase 1 | 19 | 220 |
| 20 | Sensitive cells | yes | | | A1659108 | Homo sapiens, clone | 20 | N/A |
| | | | | | | IMAGE: 3908182, mRNA, partial | | |
| | | | | | | cds | | |
| 21 | Sensitive cells | yes | | | U72649 | BTG family, member 2 | 21 | 221 |
| 22 | Sensitive cells | | yes | | M64571 | microtubule-associated protein 4 | 22 | 222 |
| 23 | Sensitive cells | yes | | | X77909 | nuclear factor of kappa light | 23 | 223 |
| | | | | | | polypeptide gene enhancer is B- | | |
| | | | | | | cells inhibitor-like 1 | | |
| 24 | Sensitive cells | | | | M34064 | cadherin 2, type 1, N-cadherin | 24 | 224 |
| | | | | | | (neuronal) | | |
| 25 | Sensitive cells | | | | AL050345 | chromosome 22 open reading frame 2 | 25 | 225 |
| 26 | Sensitive cells | yes | | | AB006622 | KIAA0284 protein | 26 | 226 |
| 27 | Sensitive cells | yes | | | AB029027 | KIAA1104 protein | 27 | 227 |
| 28 | Sensitive cells | yes | | | U51903 | IQ motif containing GTPase | 28 | 228 |
| | | | | | | activating protein 2 | | |
| 29 | Sensitive cells | | | | AF041259 | zinc finger protein 217 | 29 | 229 |
| 30 | Sensitive cells | yes | | | AB026891 | solute carrier family 7, (cationic | 30 | 230 |
| | | | | | | amino acid transporter, y+ system) | | |
| | | | | | | member 11 | | |
| 31 | Sensitive cells | | | | AB007960 | SH3-domain, GRB2-like, | 31 | 231 |
| | | | | | | endophilin B1 | | |
| 32 | Sensitive cells | | | | D63390 | platelet-activating factor | 32 | 232 |
| | | | | | | acetylhydrolase, isoform Ib, beta | | |
| | | | | | | subunit (30 kD) | | |
| 33 | Sensitive cells | | | | L10678 | profilin 2 | 33 | 233 |
| 34 | Sensitive cells | yes | | | X60708 | dipeptidylpeptidase IV (CD26, | 34 | 234 |
| | | | | | | adenosine deaminase complexing | | |
| | | | | | | protein 2) | | |
| 35 | Sensitive cells | | | | Y15521 | acetylserotonin O- | 35 | 235 |
| | | | | | | methyltransferase-like | | |
| 36 | Sensitive cells | | yes | | AI038821 | v-Ha-ras Harvey rat sarcoma viral | 36 | 236 |
| | | | | | | oncogene homolog | | |
| 37 | Sensitive cells | | | | X84740 | ligase III, DNA, ATP-dependent | 37 | 237 |
| 38 | Sensitive cells | | | | M23115 | ATPase, Ca++ transporting, cardiac | 38 | 238 |
| | | | | | | muscle, slow twitch 2 | | |
| 39 | Sensitive cells | | | | NM017432 | prostate tumor over expressed gene 1 | 39 | 239 |
| 40 | Sensitive cells | | | | Y12781 | transducin (beta)-like 1 | 40 | 240 |
| 41 | Sensitive cells | yes | | | K03498 | Homo sapiens endogenous | 41 | 241 |
| | | | | | | retrovirus HERV-K104 long | | |
| | | | | | | terminal repeat, complete sequence; | | |
| | | | | | | and Gag protein (gag) end envelope | | |
| | | | | | | protein (env) polynucleotides and | | |
| | | | | | | polypeptides, complete cds | | |
| 42 | Sensitive cells | | | | AF030335 | purinergic receptor P2Y, G-protein | 42 | 242 |
| | | | | | | coupled, 11 | | |
| 43 | Sensitive cells | | | | X93209 | nardilysin (N-arginine dibasic | 43 | 243 |
| | | | | | | convertase) | | |
| 44 | Sensitive cells | | | | AF068744 | double homeobox, 2 | 44 | 244 |
| 45 | Sensitive cells | | | | AF072247 | methyl-CpG binding domain | 45 | 245 |
| | | | | | | protein 3 | | |
| 46 | Sensitive cells | | yes | | U41344 | proline arginine-rich end leucine- | 46 | 246 |
| | | | | | | rich repeat protein | | |
| 47 | Sensitive cells | yes | | | D13413 | heterogeneous nuclear | 47 | 247 |
| | | | | | | ribonucleoprotein U (scaffold | | |
| | | | | | | attachment factor A) | | |
| 48 | Sensitive cells | yes | | | M69023 | tetraspan 3 | 48 | 248 |
| 49 | Sensitive cells | | | | J04599 | biglycan | 49 | 249 |
| 50 | Sensitive cells | | | | U79267 | protein phosphatase 4, regulatory | 50 | 250 |
| | | | | | | subunit 1 | | |
| 51 | Sensitive cells | yes | | | AF155654 | Human putative ribosomal protein | 51 | 251 |
| | | | | | | S1 mRNA | | |
| 52 | Sensitive cells | | | | X12794 | nuclear receptor subfamily 2, group | 52 | 252 |
| | | | | | | F, member 6 | | |
| 53 | Sensitive cells | | | | U51166 | thymine-DNA glycosylase | 53 | 253 |
| 54 | Sensitive cells | yes | | | L07261 | adducin 1 (alpha) | 54 | 254 |
| 55 | Sensitive cells | | | | U97188 | IGF-II mRNA-binding protein 3 | 55 | 255 |
| 56 | Sensitive cells | yes | | | L37033 | FK506-binding protein 8 (38 kD) | 56 | 256 |
| 57 | Sensitive cells | yes | | | Y09846 | SHC (Src homology 2 domain- | 57 | 257 |
| | | | | | | containing) transforming protein 1 | | |
| 58 | Sensitive cells | yes | | | AF093420 | hsp70-interacting protein | 58 | 258 |
| 59 | Sensitive cells | yes | | | U19775 | mitogen-activated protein kinase 14 | 59 | 259 |
| 60 | Sensitive cells | | | | J04027 | ATPase, Ca++ transporting, plasma | 60 | 260 |
| | | | | | | membrane 1 | | |
| 61 | Resistant cells | yes | | | Y18483 | solute carrier family 7 (cationic | 61 | 261 |
| | | | | | | amino acid transporter, y+ system), | | |
| | | | | | | member 8 | | |
| 62 | Resistant cells | yes | | | U57352 | amiloride-sensitive cation channel | 62 | 262 |
| | | | | | | 1, neuronal (degenerin) | | |
| 63 | Resistant cells | yes | | | U34994 | protein kinase, DNA-activated, | 63 | 263 |
| | | | | | | catalytic polypeptide | | |
| 64 | Resistant cells | yes | | | X79067 | zinc finger protein 36, C3H type- | 64 | 264 |
| | | | | | | like 1 | | |
| 65 | Resistant cells | yes | | | AB011535 | FAT tumor suppressor (Drosophila) | 65 | 265 |
| | | | | | | homolog 2 | | |
| 66 | Resistant cells | yes | | | U90902 | Human clone 23612 mRNA | 66 | N/A |
| | | | | | | sequence | | |
| 67 | Resistant cells | | | | AB009282 | cytochrome b5 outer mitochondrial | 67 | 266 |
| | | | | | | membrane precursor | | |
| 68 | Resistant cells | | yes | | AJ001685 | killer cell lectin-like receptor | 68 | 267 |
| | | | | | | subfamily C, member 3 | | |
| 69 | Resistant cells | yes | | | S37730 | insulin-like growth factor binding | 69 | 268 |
| | | | | | | protein 2 (36 kD) | | |
| 70 | Resistant cells | | yes | | U37518 | tumor necrosis factor (ligand) | 70 | 269 |
| | | | | | | superfamily, member 10 | | |
| 71 | Resistant cells | yes | | | AC005329 | NADH dehydrogenase (ubiquinone) | 71 | 270 |
| | | | | | | Fe-S protein 7 (20 kD) (NADH- | | |
| | | | | | | coenzyme Q reductase) | | |
| 72 | Resistant cells | | yes | | AB009426 | apolipoprotein B mRNA editing | 72 | 271 |
| | | | | | | enzyme, catalytic polypeptide 1 | | |
| 73 | Resistant cells | | yes | | X70340 | transforming growth factor, alpha | 73 | 272 |
| 74 | Resistant cells | yes | | | U81561 | protein tyrosine phosphatase, | 74 | 273 |
| | | | | | | receptor type, N polypeptide 2 | | |
| 75 | Resistant cells | | yes | | X70040 | macrophage stimulating 1 receptor | 75 | 274 |
| | | | | | | (c-met-related lyrosine kinase) | | |
| 76 | Resistant cells | yes | | | AB000449 | vaccinia related kinase 1 | 76 | 275 |
| 77 | Resistant cells | yes | | | D87119 | GS3955 protein | 77 | 276 |
| 78 | Resistant cells | yes | | | X06745 | polymerase (DNA directed), alpha | 78 | 277 |
| 79 | Resistant cells | yes | | | X78817 | Rho GTPase activating protein 4 | 79 | 278 |
| 80 | Resistant cells | yes | | | AF070530 | hypothetical protein, clone 24751 | 80 | 279 |
| 81 | Resistant cells | yes | | | L43821 | enhancer of filamentation 1 (cas- | 81 | 280 |
| | | | | | | like docking; Crk-associated | | |
| | | | | | | substrate related) | | |
| 82 | Resistant cells | yes | | | AF007156 | KIAA0751 gene product | 82 | 281 |
| 83 | Resistant cells | yes | | | AB014566 | KIAA0666 protein | 83 | 282 |
| 84 | Resistant cells | | | yes | U71364 | serine (or cysteine) proteinase | 84 | 283 |
| | | | | | | inhibitor, clade B (ovalbumin), | | |
| | | | | | | member 9 | | |
| 85 | Resistant cells | | | | U93305 | Homo sapiens A4 differentiation- | 85 | 284 |
| | | | | | | dependent protein (A4), triple LIM | | |
| | | | | | | domain protein (LMO6), and | | |
| | | | | | | synaptophysin (SYP) | | |
| | | | | | | polynucleotides and polypeptides, | | |
| | | | | | | complete cds; and calcium channel | | |
| | | | | | | alpha-1 subunit (CACNA1F) gene, | | |
| | | | | | | partial cds | | |
| 86 | Resistant cells | yes | | | AB006626 | histone deacetylase 4 | 86 | 285 |
| 87 | Resistant cells | yes | | | M31682 | inhibin, beta B (activin AB beta | 87 | 286 |
| | | | | | | polypeptide) | | |
| 88 | Resistant cells | yes | | | AF031824 | cystain F (leukocystatin) | 88 | 287 |
| 89 | Resistant cells | | yes | | AF035299 | docking protein 1, 62 kD | 89 | 288 |
| | | | | | | (downstream of tyrosine kinase 1) | | |
| 90 | Resistant cells | | | | X82207 | ARP1 (actin-related protein 1, | 90 | 289 |
| | | | | | | yeast) homolog B (centractin beta) | | |
| 91 | Resistant cells | yes | | | U84570 | chromosome 21 open reading frame 2 | 91 | 290 |
| 92 | Resistant cells | | | | AA873266 | pyruvate dehydrogenase kinase, | 92 | 291 |
| | | | | | | isoenzyme 3 | | |
| 93 | Resistant cells | yes | | | X90976 | runt-related transcription factor 1 | 93 | 292 |
| | | | | | | (acute mycloid leukemin 1; aml1 | | |
| | | | | | | oncogene) | | |
| 94 | Resistant cells | yes | | | D89377 | msh (Drosophila) homeo box | 94 | 293 |
| | | | | | | homolog 2 | | |
| 95 | Resistant cells | | | | M57730 | ephrin-A1 | 95 | 294 |
| 96 | Resistant cells | yes | | | U68111 | protein phosphatase 1, regulatory | 96 | 295 |
| | | | | | | (inhibitor) subunit 2 | | |
| 97 | Resistant cells | yes | | | L07540 | replication factor C (activator 1) 5 | 97 | 296 |
| | | | | | | (36.5 kD) | | |
| 98 | Resistant cells | | | | M65066 | protein kinase, cAMP-dependent, | 98 | 297 |
| | | | | | | regulatory, type I, beta | | |
| 99 | Resistant cells | yes | | | M34182 | protein kinase, cAMP-dependent, | 99 | 299 |
| | | | | | | catalytic, gamma | | |
| 100 | Resistant cells | yes | | | L34059 | cadherin 4, type 1, R-cadherin | 100 | 299 |
| | | | | | | (retinal) | | |
| 101 | Resistant cells | | | | L25665 | guamine nucleotide binding protein- | 101 | 300 |
| | | | | | | like 1 | | |
| 102 | Resistant cells | yes | | | AL050290 | spermidine/spermine N1- | 102 | 301 |
| | | | | | | acetyltransferase | | |
| 103 | Resistant cells | | | | X67325 | interferon, alpha-inducible protein | 103 | 302 |
| | | | | | | 27 | | |
| 104 | Resistant cells | yes | | | AA595596 | ADP-ribosyltransferase (NAD+; | 104 | N/A |
| | | | | | | poly(ADP-ribose) polymerase)-like 2 | | |
| 105 | Resistant cells | yes | | | AF003837 | jagged 1 (Alagille syndrome) | 105 | 303 |
| 106 | Resistant cells | yes | | | M87339 | replication factor C (activator 1) 4 | 106 | 304 |
| | | | | | | (37 kD) | | |
| 107 | Resistant cells | | | | AI813532 | tumor necrosis factor receptor | 107 | N/A |
| | | | | | | superfamily, member 1B | | |
| 108 | Resistant cells | yes | | | AB018306 | KIAA0763 gene product | 108 | 305 |
| 109 | Resistant cells | yes | | | AI761647 | Home saplens clone IMAGE 21721 | 109 | N/A |
| 110 | Resistant cells | | | yes | X80507 | Yes-associated protein 1, 65 kDa | 110 | 306 |
| 111 | Resistant cells | | | | Y16241 | nebulette | 111 | 307 |
| 112 | Resistant cells | | | | D67031 | adducin 3 (gamma) | 112 | 308 |
| 113 | Resistant cells | | | | J05581 | mucin 1, transmembrane | 113 | 309 |
| 114 | Resistant cells | yes | | | U19718 | microfibrillar-associated protein 2 | 114 | 310 |
| 115 | Resistant cells | yes | | | U52840 | sema domain, seven | 115 | 311 |
| | | | | | | thrombospondin repeats (type 1 and | | |
| | | | | | | type 1-like), transmembrane domain | | |
| | | | | | | (TM) and short cytoplasmic | | |
| | | | | | | domain, (semaphorin) 5A | | |
| 116 | Resistant cells | yes | | | AB014557 | KIAA0657 protein | 116 | 312 |
| 117 | Resistant cells | yes | | | AF038172 | hypothetical protein FLJ11149 | 117 | N/A |
| 118 | Resistant cells | | | | AB014529 | A kinase (PRKA) anchor protein 11 | 118 | 313 |
| 119 | Resistant cells | yes | | | U65676 | Hermansky-Pudlak syndrome | 119 | 314 |
| 120 | Resistant cells | yes | | | U14971 | ribosomal protein S9 | 120 | 315 |
| 121 | Resistant cells | yes | | | X74331 | primase, polypeptide 2A (58 kD) | 121 | 316 |
| 122 | Resistant cells | yes | | | D16815 | nuclear receptor subfamily 1, group | 122 | 317 |
| | | | | | | D, member 2 | | |
| 123 | Resistant cells | yes | | | M14333 | Homo sapiens cDNA FLJ32137 fis, | 123 | 318 |
| | | | | | | clone PEBLM2000479, highly | | |
| | | | | | | similar to PROTO-ONCOGENE | | |
| | | | | | | TYROSINE-PROTEIN KINASE | | |
| | | | | | | FYN (EC 2.7.1.112) | | |

[0302] TABLE 4

| | | Common to all | | | | | | |
|---|---|---|---|---|---|---|---|---|
| | | 4 BMS | | | | | | |
| | Highly | compounds | | | | | | SEQ ID |
| | Expressed | (BMS-A, BMS- | Common to | Common to | | | SEQ ID | NO: of |
| | Cells (Sensitive | B, BMS-C, | BMS-B | BMS-C | Genbank | | NO: of | Amino |
| Gene # | or Resistent) | BMS-D) | Compound | Compound | Accession # | UniGene Title | DNA | Acid |
| 1 | Sensitive cells | yes | | | M22489 | bone morphogenetic protein 2 | 3 | 204 |
| 2 | Sensitive cells | yes | | | AB023194 | KIAA0977 protein | 4 | 205 |
| 3 | Sensitive cells | yes | | | AF009674 | axin | 14 | 215 |
| 4 | Sensitive cells | yes | | | NM_006979 | HLA class II region expressed gene | 2 | 203 |
| | | | | | | KE4 | | |
| 5 | Sensitive cells | | | yes | M28668 | cystic fibrosis transmembrane | 124 | 319 |
| | | | | | | conductance regulator, ATP- | | |
| | | | | | | binding cassette (sub-family C, | | |
| | | | | | | member 7) | | |
| 6 | Sensitive cells | yes | | | AF000560 | Homo sapiens TTF-I interacting | 9 | 210 |
| | | | | | | peptide 20 mRNA, partial cds | | |
| 7 | Sensitive cells | yes | | | M88458 | KDEL (Lys-Asp-Glu-Leu) | 6 | 207 |
| | | | | | | endoplasmic reticulum protein | | |
| | | | | | | retention receptor 2 | | |
| 8 | Sensitive cells | yes | | | AB006622 | KIAA0284 protein | 26 | 226 |
| 9 | Sensitive cells | yes | | | AB014558 | cryptochrome 2 (photolyase-like) | 1 | 202 |
| 10 | Sensitive cells | yes | | | M58603 | nuclear factor of kappa light | 18 | 219 |
| | | | | | | polypeptide gene enhancer in B- | | |
| | | | | | | cells 1 (p105) | | |
| 11 | Sensitive cells | | | yes | W29065 | ESTs, Weakly similar to A28996 | 125 | N/A |
| | | | | | | proline-rich protein M14 precursor - | | |
| | | | | | | mouse [M. musculus] | | |
| 12 | Sensitive cells | yes | | | U03688 | cytochrome P450, subfamily I | 5 | 206 |
| | | | | | | (dioxin-inducible), polypeptide 1 | | |
| | | | | | | (glaucoma 3, primary infantile) | | |
| 13 | Sensitive cells | yes | | | K03498 | Homo sapiens endogenous | 41 | 241 |
| | | | | | | retrovirus HERV-K104 long | | |
| | | | | | | terminal repeat, complete sequence; | | |
| | | | | | | and Gag protein (gag) and envelope | | |
| | | | | | | protein (env) polynucleotides and | | |
| | | | | | | polypeptides, complete cds | | |
| 14 | Sensitive cells | yes | | | M73077 | glucocorticoid receptor DNA | 15 | 216 |
| | | | | | | binding factor 1 | | |
| 15 | Sensitive cells | yes | | | L40802 | hydroxysteroid (17-beta) | 12 | 213 |
| | | | | | | dehydrogenase 2 | | |
| 16 | Sensitive cells | | | yes | AL050025 | ESTs | 126 | 320 |
| 17 | Sensitive cells | yes | | | AB026891 | solute carrier family 7, (cationic | 30 | 230 |
| | | | | | | amino acid transporter; y+ system) | | |
| | | | | | | member 11 | | |
| 18 | Sensitive cells | | | yes | AF000561 | HIV-1 inducer of short transcripts | 127 | 321 |
| | | | | | | binding protein; lymphoma related | | |
| | | | | | | factor | | |
| 19 | Sensitive cells | yes | | | U15655 | Ets2 repressor factor | 16 | 217 |
| 20 | Sensitive cells | | yes | | U41344 | proline arginine-rich end leucine- | 46 | 246 |
| | | | | | | rich repeat protein | | |
| 21 | Sensitive cells | yes | | | M69023 | tetraspan 3 | 47 | 247 |
| 22 | Sensitive cells | | | yes | AB008515 | retinotic acid repressible protein | 48 | 248 |
| 23 | Sensitive cells | | | | AJ011736 | GRB2-related adaptor protein 2 | 129 | 323 |
| 24 | Sensitive cells | yes | | | U72649 | BTG family, member 2 | 21 | 221 |
| 25 | Sensitive cells | | yes | | U21551 | branched chain aminotransferase 1, | 8 | 209 |
| | | | | | | cytosolic | | |
| 26 | Sensitive cells | yes | | | D13413 | heterogeneous nuclear | 47 | 247 |
| | | | | | | ribonucleoprotein U (scaffold | | |
| | | | | | | attachment factor A) | | |
| 27 | Sensitive cells | yes | | | U19775 | mitogen-activated protein kinase 14 | 59 | 259 |
| 28 | Sensitive cells | | | | J00277 | Human (genomic clones lambda- | 130 | 324 |
| | | | | | | [SK2-T2, HS578T]; cDNA clones | | |
| | | | | | | RS- [symbol] 3, 4, | | |
| 29 | Sensitive cells | yes | | | X77909 | c-Ha-ras1 proto-oncogene | 23 | 223 |
| 30 | Sensitive cells | | | yes | Y10055 | phospboinositide-3-kinase, | 131 | 325 |
| | | | | | | catalytic, delta polypeptide | | |
| 31 | Sensitive cells | yes | | | AB029027 | KIAA1104 protein | 27 | 227 |
| 32 | Sensitive cells | yes | | | X60708 | dipeptidylpeptidase IV (CD26, | 34 | 234 |
| | | | | | | adenosine deaminase complexing | | |
| | | | | | | protein 2) | | |
| 33 | Sensitive cells | yes | | | X13916 | low density lipoprotein-related | 13 | 214 |
| | | | | | | protein 1 (alpha-2-macroglobulin | | |
| | | | | | | receptor) | | |
| 34 | Sensitive cells | yes | | | L37033 | FK506-binding protein 8 (38 kD) | 56 | 256 |
| 35 | Sensitive cells | yes | | | AF155654 | Human putative ribosomal protein | 51 | 251 |
| | | | | | | S1 mRNA | | |
| 36 | Sensitive cells | yes | | | L13463 | regulator of G-protein signalling 2, | 7 | 208 |
| | | | | | | 24 kD | | |
| 37 | Sensitive cells | yes | | | AI659108 | Homo sapiens, clone | 20 | N/A |
| | | | | | | IMAGE: 3908182, mRNA, partial | | |
| | | | | | | cds | | |
| 38 | Sensitive cells | | | | W26652 | PTEN induced putative kinase 1 | 132 | N/A |
| 39 | Sensitive cells | yes | | | U51903 | IQ motif containing GTPase | 28 | 228 |
| | | | | | | activating protein 2 | | |
| 40 | Sensitive cells | | | yes | M11717 | heat shock 70 kD protein 1A | 133 | 326 |
| 41 | Sensitive cells | | | yes | L32976 | mitogen-activated protein kinase | 134 | 327 |
| | | | | | | kinase kinase 11 | | |
| 42 | Sensitive cells | yes | | | L07261 | adducin 1 (alpha) | 54 | 254 |
| 43 | Sensitive cells | | | | M29893 | v-ral simian leukemia viral | 135 | 328 |
| | | | | | | oncogene homolog A (ras related) | | |
| 44 | Sensitive cells | | | | S70154 | acetyl-Coenzyme A | 136 | 329 |
| | | | | | | acetyltransferase 2 (acetoacetyl | | |
| | | | | | | Coenzyme A thiolase) | | |
| 45 | Sensitive cells | | | yes | D83542 | cadherin 15, M-cadherin | 137 | 330 |
| | | | | | | (myotubule) | | |
| 46 | Sensitive cells | | | | Z74615 | collagen, type I, alpha 1 | 138 | 331 |
| 47 | Sensitive cells | | | yes | M96684 | purine-rich element binding protein A | 139 | 332 |
| 48 | Sensitive cells | yes | | | AF093420 | hsp70-interacting protein | 58 | 258 |
| 49 | Sensitive cells | | | yes | D12763 | interleukin 1 receptor-like 1 | 140 | 333 |
| 50 | Sensitive cells | | | | S67070 | heat shock 27 kD protein 2 | 141 | 334 |
| 51 | Sensitive cells | | yes | | M64571 | microtubule-associated protein 4 | 22 | 222 |
| 52 | Sensitive cells | yes | | | Y09846 | SHC (Src homology 2 domain- | 57 | 257 |
| | | | | | | containing) transforming protein 1 | | |
| 53 | Sensitive cells | | | | X66435 | 3-hydroxy-3-methylglutaryl- | 142 | 335 |
| | | | | | | Coenzyme A synthase 1 (soluble) | | |
| 54 | Sensitive cells | | | | U25138 | potassium large conductance | 143 | 336 |
| | | | | | | calcium-activated channel, | | |
| | | | | | | subfamily M, beta member 1 | | |
| 55 | Sensitive cells | | | yes | D85131 | MYC-associated zinc finger protein | 144 | 337 |
| | | | | | | (purine-binding transcription factor) | | |
| 56 | Resistant cells | yes | | | AC005329 | NADH dehydrogenase (ubiquinone) | 71 | 270 |
| | | | | | | Fe-S protein 7 (20 kD) (NADH- | | |
| | | | | | | coenzyme Q reductase) | | |
| 57 | Resistant cells | | yes | | AJ001685 | killer cell lectin-like receptor | 68 | 267 |
| | | | | | | subfamily C, member 3 | | |
| 58 | Resistant cells | yes | | | U90902 | Human clone 23612 mRNA | 66 | N/A |
| | | | | | | sequence | | |
| 59 | Resistant cells | | yes | | X70340 | transforming growth factor, alpha | 73 | 272 |
| 60 | Resistant cells | yes | | | X79067 | zinc finger protein 36, C3H type- | 64 | 264 |
| | | | | | | like 1 | | |
| 61 | Resistant cells | yes | | | Y18483 | solute carrier family 7 (cationic | 61 | 261 |
| | | | | | | amino acid transporter, y+ system), | | |
| | | | | | | member 8 | | |
| 62 | Resistant cells | yes | | | U57352 | amiloride-sensitive cation channel | 62 | 262 |
| | | | | | | 1, neuronal (degenerin) | | |
| 63 | Resistant cells | yes | | | S37730 | insulin-like growth factor binding | 69 | 268 |
| | | | | | | protein 2 (36 kD) | | |
| 64 | Resistant cells | yes | | | D87119 | GS3955 protein | 77 | 276 |
| 65 | Resistant cells | | | yes | M36089 | X-ray repair complementing | 145 | 338 |
| | | | | | | defective repair in Chinese hamaster | | |
| | | | | | | cells 1 | | |
| 66 | Resistant cells | yes | | | U34994 | protein kinase, DNA-activated, | 63 | 263 |
| | | | | | | catalytic polypeptide | | |
| 67 | Resistant cells | | | yes | AC004472 | Homo sapiens chromosome 9, P1 | 146 | 339 |
| | | | | | | clone 11659 | | |
| 68 | Resistant cells | | | yes | AB009010 | ubiquitin C | 147 | 340 |
| 69 | Resistant cells | | | | D26158 | ELAV (embryonic lethal, abnormal | 148 | 341 |
| | | | | | | vision, Drosophila)-like 3 (Hu | | |
| | | | | | | antigen C) | | |
| 70 | Resistant cells | yes | | | AF007156 | KIAA0751 gene product | 82 | 281 |
| 71 | Resistant cells | yes | | | AF031824 | cystatin F (leukocystatin) | 88 | 287 |
| 72 | Resistant cells | yes | | | AA595596 | ADP-ribosyltransferase (NAD+; | 104 | N/A |
| | | | | | | poly(ADP-ribose) polymerase)-like 2 | | |
| 73 | Resistant cells | | | yes | AL035307 | H. sapiens gene from PAC 42616 | 149 | 342 |
| 74 | Resistant cells | yes | | | AB000449 | vaccinia related kinase 1 | 76 | 275 |
| 75 | Resistant cells | yes | | | AF070530 | hypothetical protein, clone 24751 | 80 | 279 |
| 76 | Resistant cells | yes | | | AB011535 | FAT tumor suppressor (Drosophila) | 65 | 265 |
| | | | | | | homolog 2 | | |
| 77 | Resistant cells | yes | | | AB014566 | KIAA0666 protein | 83 | 282 |
| 78 | Resistant cells | yes | | | U81561 | protein tyrosine phosphatase, | 74 | 273 |
| | | | | | | receptor type, N polypeptide 2 | | |
| 79 | Resistant cells | yes | | | M31682 | inhibin, beta B (activin AB beta | 87 | 286 |
| | | | | | | polypeptide) | | |
| 80 | Resistant cells | yes | | | X90976 | runt-related transcription factor 1 | 93 | 292 |
| | | | | | | (acute myeloid leukemia 1; aml1 | | |
| | | | | | | oncogene) | | |
| 81 | Resistant cells | yes | | | X06745 | polymerase (DNA directed), alpha | 78 | 277 |
| 82 | Resistant cells | | | yes | AL043470 | hypothetical protein FLJ10335 | 150 | N/A |
| 83 | Resistant cells | yes | | | U84570 | chromosome 21 open reading frame 2 | 91 | 290 |
| 84 | Resistant cells | yes | | | L34059 | cadherin 4, type 1, R-cadherin | 100 | 299 |
| | | | | | | (retinal) | | |
| 85 | Resistant cells | yes | | | U19718 | microfibrillar-associated protein 2 | 114 | 310 |
| 86 | Resistant cells | yes | | | U52840 | sema domain, seven | 115 | 311 |
| | | | | | | thrombospondin repeats (type 1 and | | |
| | | | | | | type 1-like), transmembrane domain | | |
| | | | | | | (TM) and short cytoplasmic | | |
| | | | | | | domain, (semaphorin) 5A | | |
| 87 | Resistant cells | yes | | | L07540 | replication factor C (activator 1) 5 | 97 | 296 |
| | | | | | | (36.5 KD) | | |
| 88 | Resistant cells | | | yes | U67733 | phosphodiesterase 2A, cGMP- | 151 | 343 |
| | | | | | | stimulated | | |
| 89 | Resistant cells | | | | D28118 | zinc finger protein 161 | 152 | 344 |
| 90 | Resistant cells | | | yes | AB020661 | KIAA0854 protein | 153 | 345 |
| 91 | Resistant cells | yes | | | U68111 | protein phosphatase 1, regulatory | 96 | 295 |
| | | | | | | (inhibitor) subunit 2 | | |
| 92 | Resistant cells | | | | W72186 | S100 calcium-binding protein A4 | 154 | 346 |
| | | | | | | (calcium protien, calvasculin, | | |
| | | | | | | metastasin, murine placental | | |
| | | | | | | homolog) | | |
| 93 | Resistant cells | yes | | | L43821 | enhancer of filamentation 1 (cns- | 81 | 280 |
| | | | | | | like docking; Crk-associated | | |
| | | | | | | substrate related) | | |
| 94 | Resistant cells | | | | U97067 | catenin (cadherin-associated | 155 | 347 |
| | | | | | | protein), alpha-like 1 | | |
| 95 | Resistant cells | yes | | | AF003837 | jagged 1 (Alagille syndrome) | 105 | 303 |
| 96 | Resistant cells | yes | | | AF038172 | hypothetical protein FLJ11149 | 117 | N/A |
| 97 | Resistant cells | | | | AF0361261 | hypothetical PRO2032 | 156 | 348 |
| 98 | Resistant cells | yes | | | AB018306 | KIAA0763 gene product | 108 | 305 |
| 99 | Resistant cells | yes | | | M14333 | Homo sapiens cDNA FLJ32137 fis, | 123 | 318 |
| | | | | | | clone PEBLM2000479, highly | | |
| | | | | | | similar to PROTO-ONCOGENE | | |
| | | | | | | TYROSINE-PROTEIN KINASE | | |
| | | | | | | FYN (EC 2.7.1.112) | | |
| 100 | Resistant cells | | | yes | AB007870 | KIAA0410 gene product | 157 | 349 |
| 101 | Resistant cells | yes | | | AB014557 | KIAA0657 protein | 116 | 312 |
| 102 | Resistant cells | | yes | | AB009426 | apolipoprotein B mRNA editing | 72 | 271 |
| | | | | | | enzyme, catalytic polypeptide 1 | | |
| 103 | Resistant cells | | yes | | U37518 | tumor necrosis factor (ligand) | 70 | 269 |
| | | | | | | superfamily, member 10 | | |
| 104 | Resistant cells | yes | | | X78817 | Rho GTPase activating protein 4 | 79 | 278 |
| 105 | Resistant cells | yes | | | AB006626 | histone deacetylase 4 | 86 | 285 |
| 106 | Resistant cells | | | | AB014519 | Rho-associated, coiled-coil | 158 | 350 |
| | | | | | | containing protein kinase 2 | | |
| 107 | Resistant cells | yes | | | AL050290 | spermidine/spermine N1- | 102 | 301 |
| | | | | | | acetyltransferase | | |
| 108 | Resistant cells | yes | | | D89377 | msh (Drosophila) homeo box | 94 | 293 |
| | | | | | | homolog 2 | | |
| 109 | Resistant cells | yes | | | X74331 | primase, polypeptide 2A (58 kD) | 121 | 316 |
| 110 | Resistant cells | | yes | | AF035299 | docking protein 1, 62 kD | 89 | 288 |
| | | | | | | (downstream of tyrosine kinase 1) | | |
| 111 | Resistant cells | | yes | | X70040 | macrophage stimulating 1 receptor | 75 | 274 |
| | | | | | | (c-met-related tyrosine kinase) | | |
| 112 | Resistant cells | yes | | | U14971 | ribosomal protein S9 | 120 | 315 |
| 113 | Resistant cells | yes | | | U65676 | Hermansky-Pudlak syndrome | 119 | 314 |
| 114 | Resistant cells | | | | AB011123 | KIAA0551 protein | 159 | 351 |
| 115 | Resistant cells | yes | | | M34182 | protein kinase, cAMP-dependent, | 99 | 298 |
| | | | | | | catalytic, gamma | | |
| 116 | Resistant cells | yes | | | D16815 | nuclear receptor subfamily 1, group | 122 | 317 |
| | | | | | | D, member 2 | | |
| 117 | Resistant cells | yes | | | AI761647 | Homo sapiens clone IMAGE 21721 | 109 | N/A |
| 118 | Resistant cells | | | | U09578 | mitogen-activated protein kinase- | 160 | 352 |
| | | | | | | activated protein kinase 3 | | |
| 119 | Resistant cells | yes | | | M87339 | replication factor C (activator 1) 4 | 106 | 304 |
| | | | | | | (37 kD) | | |

[0303] TABLE 5

| | | Common to all | | | | | | |
|---|---|---|---|---|---|---|---|---|
| | | 4 BMS | | | | | | |
| | Highly | compounds | Common to | | | | | SEQ ID |
| | Expressed | (BMS-A, BMS- | BMS-A/ | Common to | | | SEQ ID | NO: of |
| | Cells (Sensitive | B, BMS-C, | BMS-D | BMS-B | Genbank | | NO: of | Amino |
| Gene # | or Resistent) | BMS-D) | Compound | Compound | Accession # | UniGene Title | DNA | Acid |
| 1 | Sensitive cells | yes | | | M22489 | bone morphogenetic protein 2 | 3 | 204 |
| 2 | Sensitive cells | yes | | | AF009674 | axin | 14 | 215 |
| 3 | Sensitive cells | | | yes | D12763 | interleukin 1 receptor-like 1 | 140 | 333 |
| 4 | Sensitive cells | yes | | | AF000560 | Homo sapiens TTF-I interacting | 9 | 210 |
| | | | | | | peptide 20 mRNA, partial cds | | |
| 5 | Sensitive cells | yes | | | AB014558 | cryptochrome 2 (photolyase-like) | 1 | 202 |
| 6 | Sensitive cells | | | yes | M28668 | cystic fibrosis transmembrane | 124 | 319 |
| | | | | | | conductance regulator, ATP- | | |
| | | | | | | binding cassette (sub-family C, | | |
| | | | | | | member 7) | | |
| 7 | Sensitive cells | yes | | | M88458 | KDEL (Lys-Asp-Glu-Leu) | 6 | 207 |
| | | | | | | endoplasmic reticulum protein | | |
| | | | | | | retention receptor 2 | | |
| 8 | Sensitive cells | | | | Y17711 | calcium binding atopy-related | 161 | 353 |
| | | | | | | autoantigen 1 | | |
| 9 | Sensitive cells | yes | | | M69023 | tetraspan 3 | 48 | 248 |
| 10 | Sensitive cells | | | | L13972 | sialyltransferase 4A (beta- | 162 | 354 |
| | | | | | | galactosidase alpha-2,3- | | |
| | | | | | | sialytransferase) | | |
| 11 | Sensitive cells | yes | | | AB006622 | KIAA0284 protein | 26 | 226 |
| 12 | Sensitive cells | | | | AF055009 | old astrocyte specifically induced | 163 | 355 |
| | | | | | | substance | | |
| 13 | Sensitive cells | | yes | | X06272 | signal recognition particle receptor | 11 | 212 |
| | | | | | | (‘docking protein’) | | |
| 14 | Sensitive cells | | | yes | W29065 | ESTs, Weakly similar to A28996 | 125 | N/A |
| | | | | | | proline-rich protein M14 precursor - | | |
| | | | | | | mouse [M. musculus] | | |
| 15 | Sensitive cells | yes | | | AB023194 | KIAA0977 protein | 4 | 205 |
| 16 | Sensitive cells | | | | AF007155 | Homo sapiens clone 23763 | 164 | 356 |
| | | | | | | unknown mRNA, partial cds | | |
| 17 | Sensitive cells | yes | | | U19775 | mitogen-activated protein kinase 14 | 59 | 259 |
| 18 | Sensitive cells | yes | | | U03688 | cytochrome P450, subfamily I | 5 | 206 |
| | | | | | | (dioxin-inducible), polypeptide 1 | | |
| | | | | | | (glaucoma 3, primary infantile) | | |
| 19 | Sensitive cells | | | | AB018324 | KIAA0781 protein | 165 | 357 |
| 20 | Sensitive cells | | | yes | AF000561 | HIV-1 inducer of short transcripts | 127 | 321 |
| | | | | | | binding protein; lymphoma related | | |
| | | | | | | factor | | |
| 21 | Sensitive cells | | | | AB023154 | KIAA0937 protein | 166 | 358 |
| 22 | Sensitive cells | | | | X78992 | zinc finger protein 36, C3H type- | 167 | 359 |
| | | | | | | like 2 | | |
| 23 | Sensitive cells | yes | | | L40802 | hydroxysteroid (17-beta) | 12 | 213 |
| | | | | | | dehydrogenase 2 | | |
| 24 | Sensitive cells | yes | | | M73077 | glucocorticoid receptor DNA | 15 | 216 |
| | | | | | | binding factor 1 | | |
| 25 | Sensitive cells | yes | | | AF155654 | Human putative ribosomal protein | 51 | 251 |
| | | | | | | S1 mRNA | | |
| 26 | Sensitive cells | yes | | | U15655 | Ets2 repressor factor | 16 | 217 |
| 27 | Sensitive cells | | | | M60299 | collagen, type II, alpha 1 (primary | 168 | 360 |
| | | | | | | osteoarthritis, spondyloepiphyseal | | |
| | | | | | | dysplasia, congenital) | | |
| 28 | Sensitive cells | | | yes | AL050025 | ESTs | 126 | 320 |
| 29 | Sensitive cells | | | | M80482 | paired basic amino acid cleaving | 169 | 361 |
| | | | | | | system 4 | | |
| 30 | Sensitive cells | yes | | | X60708 | dipeptidylpeptidase IV (CD26, | 34 | 234 |
| | | | | | | adenosine deaminase complexing | | |
| | | | | | | protein 2) | | |
| 31 | Sensitive cells | | | | U47025 | ESTs, Moderately similar to | 170 | 362 |
| | | | | | | 1701409A glycogen phosphorylase | | |
| | | | | | | [H. sapiens] | | |
| 32 | Sensitive cells | | | yes | Y10055 | phosphoinositide-3-kinase, | 131 | 325 |
| | | | | | | catalytic, delta polypeptide | | |
| 33 | Sensitive cells | yes | | | L13463 | regulator of G-protein signalling 2, | 7 | 208 |
| | | | | | | 24 kD | | |
| 34 | Sensitive cells | | | | Y10032 | serum/glucocorticoid regulated | 171 | 363 |
| | | | | | | kinase | | |
| 35 | Sensitive cells | yes | | | X77909 | nuclear factor of kappa light | 23 | 223 |
| | | | | | | polypeptide gene enhancer in B- | | |
| | | | | | | cells Inhibitor-like 1 | | |
| 36 | Sensitive cells | yes | | | U51903 | IQ motif containing GTPase | 28 | 228 |
| | | | | | | activating protein 2 | | |
| 37 | Sensitive cells | | | | U57057 | coronin, actin-binding protein, 2A | 172 | 364 |
| 38 | Sensitive cells | yes | | | K03498 | Homo sapiens endogenous | 41 | 241 |
| | | | | | | retrovirus HERV-K104 long | | |
| | | | | | | terminal repeat, complete sequence; | | |
| | | | | | | and Gag protein (gag) and envelope | | |
| | | | | | | protein (env) polynucleotides and | | |
| | | | | | | polypeptides | | |
| 39 | Sensitive cells | | | | X90392 | deoxyribonuclease I-like 1 | 173 | 365 |
| 40 | Sensitive cells | | | yes | L32976 | mitogen-activated protein kinase | 134 | 327 |
| | | | | | | kinase kinase 11 | | |
| 41 | Sensitive cells | | | yes | M96684 | purine-rich element binding protein A | 139 | 332 |
| 42 | Sensitive cells | | | yes | D83542 | cadherin 15, M-cadherin | 137 | 330 |
| | | | | | | (myotubule) | | |
| 43 | Sensitive cells | yes | | | AB026891 | solute carrier family 7, (cationic | 30 | 230 |
| | | | | | | amino acid transporter, y+ system) | | |
| | | | | | | member 11 | | |
| 44 | Sensitive cells | | | | AA418437 | chromosome 1 open reading frame | 174 | N/A |
| | | | | | | 27 | | |
| 45 | Sensitive cells | | | yes | M11717 | heat shock 70 kD protein 1A | 133 | 326 |
| 46 | Sensitive cells | yes | | | AI659108 | Homo sapiens, clone | 20 | N/A |
| | | | | | | IMAGE: 3908182, mRNA, partial | | |
| | | | | | | cds | | |
| 47 | Sensitive cells | yes | | | L07261 | adducin 1 (alpha) | 54 | 254 |
| 48 | Sensitive cells | yes | | | AF093420 | hsp70-interacting protein | 58 | 258 |
| 49 | Sensitive cells | yes | | | D13413 | heterogeneous nuclear | 47 | 247 |
| | | | | | | ribonucleoprotein U (scaffold | | |
| | | | | | | attachment factor A) | | |
| 50 | Sensitive cells | | | yes | AB008515 | retinoic acid repressible protein | 128 | 322 |
| 51 | Sensitive cells | | | | X84373 | nuclear receptor interacting protein 1 | 175 | 366 |
| 52 | Sensitive cells | | | | XM_212189 | Homo sapiens glutamate receptor, | 176 | 367 |
| | | | | | | ionotropic, N-methyl D-asparate- | | |
| | | | | | | associated protein 1 (glutamate | | |
| | | | | | | binding) (GRINA), mRNA | | |
| 53 | Sensitive cells | yes | | | U72649 | D-asparate-associated protein 1 | 21 | 221 |
| | | | | | | (glutamate binding) (GRINA), | | |
| | | | | | | mRNA | | |
| 54 | Sensitive cells | yes | | | NM_006979 | HLA class II region expressed gene | 2 | 203 |
| | | | | | | KE4 | | |
| 55 | Sensitive cells | yes | | | M58603 | nuclear factor of kappa light | 18 | 219 |
| | | | | | | polypeptide gene enhancer in B- | | |
| | | | | | | cells 1 (p105) | | |
| 56 | Sensitive cells | | | | AF109134 | opioid growth factor receptor | 177 | 368 |
| 57 | Sensitive cells | yes | | | L37033 | FK506-binding protein 8 (38 kD) | 56 | 256 |
| 58 | Sensitive cells | | | | M64788 | RAP1, GTPase activating protein 1 | 178 | 369 |
| 59 | Sensitive cells | | | | U43368 | vascular endothelial growth factor B | 179 | 370 |
| 60 | Sensitive cells | yes | | | AB029027 | KIAA1104 protein | 27 | 227 |
| 61 | Sensitive cells | | | | X13293 | v-myb avian myeloblastosis viral | 180 | 371 |
| | | | | | | oncogene homolog-like 2 | | |
| 62 | Sensitive cells | | | yes | D85131 | MYC-associated zinc finger protein | 144 | 337 |
| | | | | | | (purine-binding transcription factor) | | |
| 63 | Sensitive cells | | | | AB014511 | ATPase, Class II, type 9A | 181 | 372 |
| 64 | Sensitive cells | yes | | | X13916 | low density lipoprotein-related | 13 | 214 |
| | | | | | | protein 1 (alpha-2-macroglobulin | | |
| | | | | | | receptor) | | |
| 65 | Sensitive cells | yes | | | Y09846 | SHC (Src homology 2 domain- | 57 | 257 |
| | | | | | | containing) transforming protein 1 | | |
| 66 | Resistant cells | | | yes | AC004472 | Homo sapiens chromosome 9, P1 | 146 | 339 |
| | | | | | | clone 11659 | | |
| 67 | Resistant cells | yes | | | U90902 | Human clone 23612 mRNA | 66 | N/A |
| | | | | | | sequence | | |
| 68 | Resistant cells | | | | AB014585 | KIAA0685 gene product | 182 | 373 |
| 69 | Resistant cells | yes | | | X06745 | polymerase (DNA directed), alpha | 78 | 277 |
| 70 | Resistant cells | | | | AB011114 | KIAA0542 gene product | 183 | 374 |
| 71 | Resistant cells | | | yes | AL035307 | H. sapiens gene from PAC 42616 | 149 | 342 |
| 72 | Resistant cells | yes | | | S37730 | insulin-like growth factor binding | 69 | 268 |
| | | | | | | protein 2 (36 kD) | | |
| 73 | Resistant cells | | | yes | M36089 | X-ray repair complementing | 145 | 338 |
| | | | | | | defective repair in Chinese hamster | | |
| | | | | | | cells 1 | | |
| 74 | Resistant cells | yes | | | AB000449 | vaccinia related kinase 1 | 76 | 275 |
| 75 | Resistant cells | yes | | | U34994 | protein kinase, DNA-activated, | 63 | 263 |
| | | | | | | catalytic polypeptide | | |
| 76 | Resistant cells | yes | | | AA595596 | ADP-ribosyltransferase (NAD+; | 104 | N/A |
| | | | | | | poly(ADP-ribose) polymerase)-like 2 | | |
| 77 | Resistant cells | | | yes | AB009010 | ubiquitin C | 147 | 340 |
| 78 | Resistant cells | yes | | | Y18483 | solute carrier family 7 (cationic | 61 | 261 |
| | | | | | | amino acid transporter, y+ system), | | |
| | | | | | | member 8 | | |
| 79 | Resistant cells | yes | | | U84570 | chromosome 21 open reading frame 2 | 91 | 290 |
| 80 | Resistant cells | yes | | | AF007156 | KIAA0751 gene product | 82 | 281 |
| 81 | Resistant cells | | | yes | AB007870 | KIAA0410 gene product | 157 | 349 |
| 82 | Resistant cells | | | | U80040 | aconitase 2, mitochondrial | 184 | 375 |
| 83 | Resistant cells | | | | M64174 | Janus kinase 1 (a protein tyrosine | 185 | 376 |
| | | | | | | kinase) | | |
| 84 | Resistant cells | yes | | | AB011535 | FAT tumor suppressor (Drosophila) | 65 | 265 |
| | | | | | | homolog 2 | | |
| 85 | Resistant cells | yes | | | AC005329 | NADH dehydrogenase (ubiquinone) | 71 | 270 |
| | | | | | | Fe-S protein 7 (20 kD) (NADH- | | |
| | | | | | | coenzyme Q reductase) | | |
| 86 | Resistant cells | yes | | | AF038172 | hypothetical protein FLJ11149 | 117 | N/A |
| 87 | Resistant cells | yes | | | U68111 | protein phosphatase 1, regulatory | 96 | 295 |
| | | | | | | (inhibitor) subunit 2 | | |
| 88 | Resistant cells | | yes | | U71364 | serine (or cysteine) proteinase | 84 | 283 |
| | | | | | | inhibitor, clade B (ovalbumin), | | |
| | | | | | | member 9 | | |
| 89 | Resistant cells | yes | | | D89377 | msh (Drosophila) homeo box | 94 | 293 |
| | | | | | | homolog 2 | | |
| 90 | Resistant cells | | | | Y00971 | phosphoribosyl pyrophosphate | 186 | 377 |
| | | | | | | synthetase 2 | | |
| 91 | Resistant cells | | | | AL050065 | DNA DKFZp566M043 (from clone | 187 | N/A |
| | | | | | | DKFZp566M043) | | |
| 92 | Resistant cells | | | | AF029670 | RAD51 (S. cerevisine) homolog C | 188 | 378 |
| 93 | Resistant cells | yes | | | M31682 | inhibin, beta B (activin AB beta | 87 | 286 |
| | | | | | | polypeptide) | | |
| 94 | Resistant cells | | | | X63629 | cadherin 3, type 1, P-cadherin | 189 | 379 |
| | | | | | | (placental) | | |
| 95 | Resistant cells | | | | AB028957 | KIAA1034 protein | 190 | 380 |
| 96 | Resistant cells | yes | | | D87119 | GS3955 protein | 77 | 276 |
| 97 | Resistant cells | yes | | | M14333 | Homo sapiens cDNA FLJ32137 fis, | 123 | 318 |
| | | | | | | clone PEBLM2000479, highly | | |
| | | | | | | similar to PROTO-ONCOGENE | | |
| | | | | | | TYROSINE-PROTEIN KINASE | | |
| | | | | | | FYN (EC 2.7.1.II2) | | |
| 98 | Resistant cells | yes | | | L07540 | replication factor C (activator 1) 5 | 97 | 296 |
| | | | | | | (36.5 kD) | | |
| 99 | Resistant cells | | | | X74837 | mannosidase, alpha, class 1A, | 191 | 381 |
| | | | | | | member 1 | | |
| 100 | Resistant cells | yes | | | X90976 | runt-related transcription factor 1 | 93 | 292 |
| | | | | | | (acute myeloid leukemia 1; aml1 | | |
| | | | | | | oncogene) | | |
| 101 | Resistant cells | | | | AB018273 | collagen, type I, alpha 2 | 192 | 382 |
| 102 | Resistant cells | yes | | | AF003837 | jagged 1 (Alagille syndrome) | 105 | 303 |
| 103 | Resistant cells | yes | | | AL050290 | spermidine/spermine N1- | 102 | 301 |
| | | | | | | acetyltransferase | | |
| 104 | Resistant cells | yes | | | AB014566 | KIAA0666 protein | 83 | 282 |
| 105 | Resistant cells | | | | Y15227 | deleted in lymphocytic leukemia, 1 | 193 | 383 |
| 106 | Resistant cells | yes | | | X79067 | zinc finger protein 36, C3H type- | 64 | 264 |
| | | | | | | like 1 | | |
| 107 | Resistant cells | yes | | | AF031824 | cystatin F (leukocystatin) | 88 | 287 |
| 108 | Resistant cells | | | | Y12661 | VGF nerve growth factor inducible | 194 | 384 |
| 109 | Resistant cells | yes | | | X74331 | primase, polypeptide 2A (58 kD) | 121 | 316 |
| 110 | Resistant cells | | | yes | AL043470 | hypothetical protein FLJ10335 | 150 | N/A |
| 111 | Resistant cells | | | yes | U67733 | phosphodiesterase 2A, cGMP- | 151 | 343 |
| | | | | | | stimulated | | |
| 112 | Resistant cells | | | | AL049365 | Homo sapiens mRNA; cDNA | 195 | N/A |
| | | | | | | DKFZp586A0618 (from clone | | |
| | | | | | | DKFZp586A0618) | | |
| 113 | Resistant cells | yes | | | L43821 | enhancer of filamentation 1 (cas- | 81 | 280 |
| | | | | | | like docking; Crk-associated | | |
| | | | | | | substrate related) | | |
| 114 | Resistant cells | | | | Y11395 | LanC (bacterial 1antibiotic | 196 | 385 |
| | | | | | | synthetase component C)-like 1 | | |
| 115 | Resistant cells | yes | | | L34059 | cadherin 4, type 1, R-cadherin | 100 | 299 |
| | | | | | | (retinal) | | |
| 116 | Resistant cells | | | | NM_004713 | serologically defined colon cancer | 197 | 386 |
| | | | | | | antigen 1 | | |
| 117 | Resistant cells | yes | | | AB006626 | histone deacetylase 4 | 86 | 285 |
| 118 | Resistant cells | | | | X76029 | neuromedin U | 198 | 387 |
| 119 | Resistant cells | yes | | | U81561 | protein tyrosine phosphastase, | 74 | 273 |
| | | | | | | receptor type, N polypeptide 2 | | |
| 120 | Resistant cells | yes | | | M87339 | replication factor C (activator 1) 4 | 106 | 304 |
| | | | | | | (37 kD) | | |
| 121 | Resistant cells | yes | | | U57352 | amiloride-sensitive cation channel | 62 | 262 |
| | | | | | | 1, neuronal (degenerin) | | |
| 122 | Resistant cells | yes | | | AF070530 | hypothetical protein, clone 24751 | 80 | 279 |
| 123 | Resistant cells | yes | | | U19718 | microfibrillar-associated protein 2 | 114 | 310 |
| 124 | Resistant cells | yes | | | U65676 | Hermansky-Pudlak syndrome | 119 | 314 |
| 125 | Resistant cells | yes | | | U52840 | sema domain, seven | 115 | 311 |
| | | | | | | thrombospondin repeats (type 1 and | | |
| | | | | | | type 1-like), transmembrane domain | | |
| | | | | | | (TM) and short cytoplasmic | | |
| | | | | | | domain, (semaphorin) 5A | | |
| 126 | Resistant cells | | | | AF045583 | rubby like protein 3 | 199 | 388 |
| 127 | Resistant cells | | | | X85545 | protein kinase, X-linked | 200 | 389 |
| 128 | Resistant cells | yes | | | AB014557 | KIAA0657 protein | 116 | 312 |
| 129 | Resistant cells | yes | | | M34182 | protein kinase, cAMP-dependent, | 99 | 298 |
| | | | | | | catalytic, gamma | | |
| 130 | Resistant cells | | | | X12534 | RAP2A, member of RAS oncogene | 201 | 390 |
| | | | | | | family | | |
| 131 | Resistant cells | | | yes | AB020661 | KIAA0854 protein | 153 | 345 |
| 132 | Resistant cells | yes | | | AI761647 | Homo sapiens clone IMAGE 21721 | 109 | N/A |
| 133 | Resistant cells | | yes | | X80507 | Yes-associated protein 1, 65 kDa | 110 | 306 |
| 134 | Resistant cells | yes | | | U14971 | ribosomal protein S9 | 120 | 315 |
| 135 | Resistant cells | yes | | | X78817 | Rho GTPase activating protein 4 | 79 | 278 |
| 136 | Resistant cells | yes | | | D16815 | nuclear receptor subfamily 1, group | 122 | 317 |
| | | | | | | D, member 2 | | |
| 137 | Resistant cells | yes | | | AB018306 | KIAA0763 gene product | 108 | 305 |

[0304] TABLE 6

| | Highly | | | | SEQ ID |
|---|---|---|---|---|---|
| | Expressed Cells | | | SEQ ID | NO: of |
| | (Sensitive or | Genbank | | NO: of | Amino |
| Gene # | Resistent | Accession # | UniGene Title | DNA | Acid |
| 1 | Sensitive cells | AB014558 | cryptochrome 2 (photolyase- | 1 | 202 |
| | | | like) | | |
| 2 | Sensitive cells | NM_006979 | HLA class II region expressed | 2 | 203 |
| | | | gene KE4 | | |
| 3 | Sensitive cells | M22489 | bone morphogenetic protein 2 | 3 | 204 |
| 4 | Sensitive cells | AB023194 | KIAA0977 protein | 4 | 205 |
| 5 | Sensitive cells | U03688 | cytochrome P450, subfamily I | 5 | 206 |
| | | | (dioxin-inducible), polypeptide | | |
| | | | 1 (glaucoma 3, primary | | |
| | | | infantile) | | |
| 6 | Sensitive cells | M88458 | KDEL (Lys-Asp-Glu-Leu) | 6 | 207 |
| | | | endoplasmic reticulum protein | | |
| | | | retention receptor 2 | | |
| 7 | Sensitive cells | L13463 | regulator of G-protein signalling | 7 | 208 |
| | | | 2, 24 kD | | |
| 8 | Sensitive cells | AF000560 | Homo sapiens TTF-I interacting | 9 | 210 |
| | | | peptide 20 mRNA, partial cds | | |
| 9 | Sensitive cells | L40802 | hydroxysteroid (17-beta) | 12 | 213 |
| | | | dehydrogenase 2 | | |
| 10 | Sensitive cells | X13916 | low density lipoprotein-related | 13 | 214 |
| | | | protein 1 (alpha-2- | | |
| | | | macroglobulin receptor) | | |
| 11 | Sensitive cells | AF009674 | axin | 14 | 215 |
| 12 | Sensitive cells | M73077 | glucocorticoid receptor DNA | 15 | 216 |
| | | | binding factor 1 | | |
| 13 | Sensitive cells | U15655 | Ets2 repressor factor | 16 | 217 |
| 14 | Sensitive cells | M58603 | nuclear factor of kappa light | 18 | 219 |
| | | | polypeptide gene enhancer in B- | | |
| | | | cells 1 (p105) | | |
| 15 | Sensitive cells | AI659108 | Homo sapiens, clone | 20 | N/A |
| | | | IMAGE: 3908182, mRNA, | | |
| | | | partial cds | | |
| 16 | Sensitive cells | U72649 | BTG family, member 2 | 21 | 221 |
| 17 | Sensitive cells | X77909 | nuclear factor of kappa light | 23 | 223 |
| | | | polypeptide gene enhancer in B- | | |
| | | | cells inhibitor-like 1 | | |
| 18 | Sensitive cells | AB006622 | KIAA0284 protein | 26 | 226 |
| 19 | Sensitive cells | AB029027 | KIAA1104 protein | 27 | 227 |
| 20 | Sensitive cells | U51903 | IQ motif containing GTPase | 28 | 228 |
| | | | activating protein 2 | | |
| 21 | Sensitive cells | AB026891 | solute carrier family 7, (cationic | 30 | 230 |
| | | | amino acid transporter, y+ | | |
| | | | system) member 11 | | |
| 22 | Sensitive cells | X60708 | dipeptidylpeptidase IV (CD26, | 34 | 234 |
| | | | adenosine deaminase | | |
| | | | complexing protein 2) | | |
| 23 | Sensitive cells | K03498 | Homo sapiens endogenous | 41 | 241 |
| | | | retrovirus HERV-K104 long | | |
| | | | terminal repeat, complete | | |
| | | | sequence, and Gag protein (gag) | | |
| | | | and envelope protein (env) | | |
| | | | polynucleotides and | | |
| | | | polypeptides, complete cds | | |
| 24 | Sensitive cells | D13413 | heterogeneous nuclear | 47 | 247 |
| | | | ribonucleoprotein U (scaffold | | |
| | | | attachment factor A) | | |
| 25 | Sensitive cells | M69023 | tetraspan 3 | 48 | 248 |
| 26 | Sensitive cells | AF155654 | Human putative ribosomal | 51 | 251 |
| | | | protein S1 mRNA | | |
| 27 | Sensitive cells | L07261 | adducin 1 (alpha) | 54 | 254 |
| 28 | Sensitive cells | L37033 | FK506-binding protein 8 (38 kD) | 56 | 256 |
| 29 | Sensitive cells | Y09846 | SHC (Src homology 2 domain- | 57 | 257 |
| | | | containing) transforming protein 1 | | |
| 30 | Sensitive cells | AF093420 | hsp70-interacting protein | 58 | 258 |
| 31 | Sensitive cells | U19775 | mitogen-activated protein kinase | 59 | 259 |
| | | | 14 | | |
| 32 | Resistant cells | Y18483 | solute carrier family 7 (cationic | 61 | 261 |
| | | | amino acid transporter, y+ | | |
| | | | system) member 8 | | |
| 33 | Resistant cells | U57352 | amiloride-sensitive cation | 62 | 262 |
| | | | channel 1, neuronal (degenerin) | | |
| 34 | Resistant cells | U34994 | protein kinase, DNA-activated, | 63 | 263 |
| | | | catalytic polypeptide | | |
| 35 | Resistant cells | X79067 | zinc finger protein 36, C3H | 64 | 264 |
| | | | type-like 1 | | |
| 36 | Resistant cells | AB011535 | FAT tumor suppressor | 65 | 265 |
| | | | (Drosophila) homolog 2 | | |
| 37 | Resistant cells | U90902 | Human clone 23612 mRNA | 66 | N/A |
| | | | sequence | | |
| 38 | Resistant cells | S37730 | insulin-like growth factor | 69 | 268 |
| | | | binding protein 2 (36 kD) | | |
| 39 | Resistant cells | AC005329 | NADH dehydrogenase | 71 | 270 |
| | | | (ubiquinone) Fe-S protein 7 | | |
| | | | (20 kD) (NADH-coenzyme Q | | |
| | | | reductase) | | |
| 40 | Resistant cells | U81561 | protein tyrosine phosphatase, | 74 | 273 |
| | | | receptor type, N polypeptide 2 | | |
| 41 | Resistant cells | AB000449 | vaccinia related kinase 1 | 76 | 275 |
| 42 | Resistant cells | D87119 | GS3955 protein | 77 | 276 |
| 43 | Resistant cells | X06745 | polymerase (DNA directed), | 78 | 277 |
| | | | alpha | | |
| 44 | Resistant cells | X78817 | Rho GTPase activating protein 4 | 79 | 278 |
| 45 | Resistant cells | AF070530 | hypothetical protein, clone | 80 | 279 |
| | | | 24751 | | |
| 46 | Resistant cells | L43821 | enhancer of filamentation 1 (cas- | 81 | 280 |
| | | | like docking; Crk-associated | | |
| | | | substrate related) | | |
| 47 | Resistant cells | AF007156 | KIAA0751 gene product | 82 | 281 |
| 48 | Resistant cells | AB014566 | KIAA0666 protein | 83 | 282 |
| 49 | Resistant cells | AB006626 | histone deacetylase 4 | 86 | 285 |
| 50 | Resistant cells | M31682 | inhibin, beta B (activin AB beta | 87 | 286 |
| | | | polypeptide) | | |
| 51 | Resistant cells | AF031824 | cystatin F (leukocystatin) | 88 | 287 |
| 52 | Resistant cells | U84570 | chromosome 21 open reading | 91 | 290 |
| | | | frame 2 | | |
| 53 | Resistant cells | X90976 | runt-related transcription factor | 93 | 292 |
| | | | 1 (acute myeloid leukemia 1; | | |
| | | | aml1 oncogene) | | |
| 54 | Resistant cells | D89377 | msh (Drosophila) homeo box | 94 | 293 |
| | | | homolog 2 | | |
| 55 | Resistant cells | L07540 | replication factor C (activator 1) | 97 | 296 |
| | | | 5 (36.5 kD) | | |
| 56 | Resistant cells | M34182 | protein kinase, cAMP- | 99 | 298 |
| | | | dependent, catalytic, gamma | | |
| 57 | Resistant cells | L34059 | cadherin 4, type 1, R-cadherin | 100 | 299 |
| | | | (retinal) | | |
| 58 | Resistant cells | AL050290 | spermidine/spermine N1- | 102 | 301 |
| | | | acetyltransferase | | |
| 59 | Resistant cells | AA595596 | ADP-ribosyltransferase (NAD+; | 104 | N/A |
| | | | poly(ADP-ribose) polymerase)- | | |
| | | | like 2 | | |
| 60 | Resistant cells | AF003837 | jagged 1 (Alagille syndrome) | 105 | 303 |
| 61 | Resistant cells | M87339 | replication factor C (activator 1) | 106 | 304 |
| | | | 4 (37 kD) | | |
| 62 | Resistant cells | AB018306 | KIAA0763 gene product | 108 | 305 |
| 63 | Resistant cells | AI761647 | Homo sapiens clone IMAGE | 109 | N/A |
| | | | 21721 | | |
| 64 | Resistant cells | U19718 | microfibrillar-associated protein 2 | 114 | 310 |
| 65 | Resistant cells | U52840 | sema domain, seven | 115 | 311 |
| | | | thrombospondin repeats (type 1 | | |
| | | | and type 1-like), transmembrane | | |
| | | | domain (TM) and short | | |
| | | | cytoplasmic domain, | | |
| | | | (semaphorin) 5A | | |
| 66 | Resistant cells | AB014557 | KIAA0657 protein | 116 | 312 |
| 67 | Resistant cells | AF038172 | hypothetical protein FLJ11149 | 117 | N/A |
| 68 | Resistant cells | U65676 | Hermansky-Pudlak syndrome | 118 | 313 |
| 69 | Resistant cells | U14971 | ribosomal protein S9 | 119 | 314 |
| 70 | Resistant cells | X74331 | primase, polypeptide 2A (58 kD) | 120 | 315 |
| 71 | Resistant cells | D16815 | nuclear receptor subfamily 1, | 121 | 316 |
| | | | group D, member 2 | | |
| 72 | Resistant cells | M14333 | Homo sapiens cDNA FLJ32137 | 122 | 317 |
| | | | fis, clone PEBLM2000479, | | |
| | | | highly similar to PROTO- | | |
| | | | ONCOGENE TYROSINE- | | |
| | | | PROTEIN KINASE FYN (EC | | |
| | | | 2.7.1.112) | | |
| 73 | Resistant cells | U68111 | protein phosphatase 1, | 96 | 295 |
| | | | regulatory (inhibitor) subunit 2 | | |

[0305] TABLE 7

| | | | True Class for | Error for | | Error | | |
|---|---|---|---|---|---|---|---|---|
| | Predicted | Confidence | BMS-A and | BMS-A and | True Class | for | True Class | Error for |
| Cell lines | Class | Score | BMS-D | BMS-D | for BMS-B | BMS-B | for BMS-C | BMS-C |
| WiDr | S | 0.174 | S | | S | | S | |
| SW1417 | S | 0.264 | S | | S | | S | |
| SW403 | S | 0.265 | R | * | S | | S | |
| Caco-2 | S | 0.585 | S | | S | | S | |
| SW837 | R | 0.515 | R | | R | | S | * |
| HT29 | S | 0.827 | S | | S | | S | |
| T84 | R | 0.025 | R | | S | * | S | * |
| CCD-33Co | S | 1.000 | S | | S | | S | |
| LOVO | S | 1.000 | S | | S | | S | |
| CCD-18Co | S | 0.572 | S | | S | | S | |
| LS174T | S | 0.905 | S | | S | | S | |
| HCT15 | R | 0.419 | S | * | S | * | R | |
| CX-1 | S | 0.416 | R | * | R | * | S | |
| Colo-205 | R | 0.756 | R | | R | | R | |
| RKO RM13 | R | 0.696 | R | | R | | R | |
| DLD-1 | R | 0.593 | R | | R | | R | |
| Colo-201 | R | 1.000 | R | | R | | R | |
| HCT-8 | R | 0.760 | R | | R | | R | |
| SK-Co-1 | R | 0.898 | R | | R | | R | |
| MIP | R | 0.722 | R | | R | | R | |
| Colo 320hfr | R | 1.000 | R | | R | | R | |
| LS1034 | R | 0.917 | R | | R | | R | |
| Colo320DM | R | 0.950 | R | | R | | R | |
| HCT116 | R | 0.010 | R | | R | | R | |
| HCT116S542 | R | 1.000 | R | | R | | R | |
| LS180 | R | 0.589 | R | | R | | R | |
| LS 513 | R | 0.795 | R | | R | | R | |
| SW1116 | R | 0.695 | R | | R | | R | |
| SW 948 | R | 0.523 | R | | R | | R | |
| SW 480 | R | 1.000 | R | | R | | R | |
| SW620 | R | 0.847 | R | | R | | R | |

[0306] TABLE 8

| | | | True Class for | Error for | | | | Error |
|---|---|---|---|---|---|---|---|---|
| | Predicted | Confidence | BMS-A and | BMS-A and | True Class | Error for | True Class | for |
| Cell lines | Class | Score | BMS-D | BMS-D | for BMS-B | BMS-B | for BMS-C | BMS-C |
| WiDr | S | 0.146 | S | | S | | S | |
| SW1417 | S | 0.522 | S | | S | | S | |
| SW403 | S | 0.506 | R | * | S | | S | |
| Caco-2 | S | 0.679 | S | | S | | S | |
| SW837 | R | 0.260 | R | | R | | S | * |
| HT29 | S | 0.920 | S | | S | | S | |
| T84 | S | 0.230 | R | * | S | | S | |
| CCD-33Co | S | 0.979 | S | | S | | S | |
| LOVO | S | 0.969 | S | | S | | S | |
| CCD-18Co | S | 0.488 | S | | S | | S | |
| LS174T | S | 0.619 | S | | S | | S | |
| HCT15 | R | 0.088 | S | * | S | * | R | |
| CX-1 | S | 0.522 | R | * | R | * | S | |
| Colo-205 | R | 0.950 | R | | R | | R | |
| RKO RM13 | R | 0.409 | R | | R | | R | |
| DLD-1 | R | 0.755 | R | | R | | R | |
| Colo-201 | R | 0.870 | R | | R | | R | |
| HCT-8 | R | 0.823 | R | | R | | R | |
| SK-Co-1 | R | 0.817 | R | | R | | R | |
| MIP | R | 0.781 | R | | R | | R | |
| Colo 320hfr | R | 0.530 | R | | R | | R | |
| LS1034 | R | 0.815 | R | | R | | R | |
| Colo320DM | R | 0.675 | R | | R | | R | |
| HCT116 | R | 0.261 | R | | R | | R | |
| HCT116S542 | R | 0.782 | R | | R | | R | |
| LS180 | R | 0.449 | R | | R | | R | |
| LS 513 | R | 0.615 | R | | R | | R | |
| SW1116 | R | 0.677 | R | | R | | R | |
| SW 948 | R | 0.500 | R | | R | | R | |
| SW 480 | R | 1.000 | R | | R | | R | |
| SW620 | R | 0.795 | R | | R | | R | |

[0307] TABLE 9

| | | | True Class for | Error for | | | | Error |
|---|---|---|---|---|---|---|---|---|
| | Predicted | Confidence | BMS-A and | BMS-A and | True Class for | Error for | True Class | for |
| Cell lines | Class | Score | BMS-D | BMS-D | BMS-B | BMS-B | for BMS-C | BMS-C |
| WiDr | S | 0.020 | S | | S | | S | |
| SW1417 | S | 0.286 | S | | S | | S | |
| SW403 | S | 0.288 | R | * | S | | S | |
| Caco-2 | S | 0.847 | S | | S | | S | |
| SW837 | S | 0.178 | R | * | R | * | S | |
| HT29 | S | 0.876 | S | | S | | S | |
| T84 | S | 0.344 | R | * | S | | S | |
| CCD-33Co | S | 0.870 | S | | S | | S | |
| LOVO | S | 0.908 | S | | S | | S | |
| CCD-18Co | S | 0.333 | S | | S | | S | |
| LS174T | S | 0.468 | S | | S | | S | |
| HCT15 | R | 0.426 | S | * | S | * | R | |
| CX-1 | S | 0.662 | R | * | R | * | S | |
| Colo-205 | R | 0.498 | R | | R | | R | |
| RKO RM13 | R | 0.402 | R | | R | | R | |
| DLD-1 | R | 0.834 | R | | R | | R | |
| Colo-201 | R | 0.695 | R | | R | | R | |
| HCT-8 | R | 0.300 | R | | R | | R | |
| SK-Co-1 | R | 0.525 | R | | R | | R | |
| MIP | R | 0.878 | R | | R | | R | |
| Colo 320hfr | R | 0.474 | R | | R | | R | |
| LS1034 | R | 0.837 | R | | R | | R | |
| Colo320DM | R | 0.436 | R | | R | | R | |
| HCT116 | R | 0.433 | R | | R | | R | |
| HCT116S542 | R | 0.914 | R | | R | | R | |
| LS180 | R | 0.562 | R | | R | | R | |
| LS 513 | R | 0.726 | R | | R | | R | |
| SW1116 | R | 0.589 | R | | R | | R | |
| SW 948 | R | 0.298 | R | | R | | R | |
| SW 480 | R | 0.861 | R | | R | | R | |
| SW620 | R | 0.515 | R | | R | | R | |

[0308] TABLE 10

| | | Highly |
|---|---|---|
| Accession # | Unigene Title | Expressed in |
| AB014558 | cryptochrome 2 (photolyase-like) | Sensitive cells |
| AL031228 | ring finger protein 1 | Sensitive cells |
| M22489 | bone morphogenetic protein 2 | Sensitive cells |
| AB023194 | KIAA0977 protein | Sensitive cells |
| U03688 | cytochrome P450, subfamily I | Sensitive cells |
| | (dioxin-inducible), polypeptide | |
| | 1 (glaucoma 3, primary infantile) | |
| AB026891 | solute carrier family 7, | Sensitive cells |
| | (cationic amino acid transporter, | |
| | y+ system) member 11 | |
| X60708 | dipeptidylpeptidase IV (CD26, adenosine | Sensitive cells |
| | deaminase complexing protein 2) | |
| K03498 | Human endogenous retrovirus HERV-K22 | Sensitive cells |
| | pol and envelope ORF region | |
| D13413 | heterogeneous nuclear ribonucleoprotein | Sensitive cells |
| | U (scaffold attachment factor A) | |
| M69023 | tetraspan 3 | Sensitive cells |

[0309] TABLE 11

| | | Highly |
|---|---|---|
| Accession # | Unigene Title | Expressed in |
| AB014558 | cryptochrome 2 (photolyase-like) | Sensitive cells |
| NM_006979 | HLA class II region expressed gene KE4 | Sensitive cells |
| M22489 | bone morphogenetic protein 2 | Sensitive cells |
| AF009674 | axin | Sensitive cells |
| AB006622 | KIAA0284 protein | Sensitive cells |
| AB023194 | KIAA0977 protein | Sensitive cells |
| U03688 | “cytochrome P450, subfamily I | Sensitive cells |
| | (dioxin-inducible), polypeptide 1 | |
| | (glaucoma 3, primary infantile)” | |
| L40802 | hydroxysteroid (17-beta) dehydrogenase 2 | Sensitive cells |
| Y18483 | “solute carrier family 7 (cationic amino | Resistant cells |
| | acid transporter, y+ system), | |
| | member 8” | |
| U90902 | Human clone 23612 mRNA sequence | Resistant cells |
| S37730 | insulin-like growth factor binding | Resistant cells |
| | protein 2 (36 kD) | |
| X79067 | “zinc finger protein 36, C3H type-like 1” | Resistant cells |
| D87119 | GS3955 protein | Resistant cells |
| M31682 | “inhibin, beta B (activin AB beta | Resistant cells |
| | polypeptide)” | |
| AC005329 | NADH dehydrogenase (ubiquinone) | Resistant cells |
| | Fe—S protein 7 (20 kD) (NADH- | |
| | coenzyme Q reductase) | |

[0310] TABLE 12

| | | Highly |
|---|---|---|
| Accession # | Unigene Title | Expressed in |
| AB014558 | cryptochrome 2 (photolyase-like) | Sensitive cells |
| M22489 | bone morphogenetic protein 2 | Sensitive cells |
| AF009674 | axin | Sensitive cells |
| AB006622 | KIAA0284 protein | Sensitive cells |
| AB023194 | KIAA0977 protein | Sensitive cells |
| U03688 | “cytochrome P450, subfamily I (dioxin- | Sensitive cells |
| | inducible), polypeptide 1 (glaucoma 3, | |
| | primary infantile)” | |
| L40802 | hydroxysteroid (17-beta) dehydrogenase 2 | Sensitive cells |
| X77909 | nuclear factor of kappa light polypeptide | Sensitive cells |
| | gene enhancer in B-cells inhibitor-like 1 | |
| U19775 | mitogen-activated protein kinase 14 | Sensitive cells |
| U51903 | IQ motif containing GTPase activating | Sensitive cells |
| | protein 2 | |
| X60708 | “dipeptidylpeptidase IV (CD26, | Sensitive cells |
| | adenosine deaminase complexing | |
| | protein 2)” | |
| M69023 | tetraspan 3 | Sensitive cells |
| AF155654 | Human putative ribosomal protein | Sensitive cells |
| | S1 mRNA | |
| Y18483 | “solute carrier family 7 (cationic amino | Resistant cells |
| | acid transporter, y+ system), member 8” | |
| U34994 | “protein kinase, DNA-activated, | Resistant cells |
| | catalytic polypeptide” | |
| U90902 | Human clone 23612 mRNA sequence | Resistant cells |
| S37730 | insulin-like growth factor binding | Resistant cells |
| | protein 2 (36 kD) | |
| X79067 | “zinc finger protein 36, C3H | Resistant cells |
| | type-like 1” | |
| M31682 | “inhibin, beta B (activin AB beta | Resistant cells |
| | polypeptide)” | |
| AC005329 | NADH dehydrogenase (ubiquinone) | Resistant cells |
| | Fe—S protein 7 (20 kD) (NADH- | |
| | coenzyme Q reductase) | |
| M34182 | “protein kinase, cAMP-dependent, | Resistant cells |
| | catalytic, gamma” | |
| AF007156 | KIAA0751 gene product | Resistant cells |
| M14333 | “Homo sapiens cDNA FLJ32137 fis, | Resistant cells |
| | clone PEBLM2000479, highly similar to | |
| | PROTO-ONCOGENE TYROSINE- | |
| | PROTEIN KINASE FYN | |
| | (EC 2.7.1.112)” | |
| X06745 | “polymerase (DNA directed), alpha” | Resistant cells |
| U84570 | chromosome 21 open reading frame 2 | Resistant cells |

[0311] TABLE 13

| | | | SEQ ID | | SEQ ID |
|---|---|---|---|---|---|
| | | | NO: | | NO: |
| DNA | | | Forward | | Forward |
| Seq # | Accession # | Forward Primer | Primer | Reverse Primer | Primer |
| 1 | AB014558 | CTGAACCCTTTGGGAAAGAAC | 391 | AAGCGCTTGTATGTAAGGGGT | 592 |
| 2 | NM_006979 | AGGCTTAGACCTGCGTGTGT | 392 | CTGTCCACTGCTCCTCCTTC | 593 |
| 3 | M22489 | GCAGTTTCCATCACCGAATTA | 393 | ATCAAAACTTTCCCACCTGCT | 594 |
| 4 | AB023194 | AATCCACTGCTTTCATCATGG | 394 | TGTTCAGCTGACAACAGATCG | 595 |
| 5 | U03688 | AACTGTCCATCAGGTGAGGTG | 395 | TTCATTGGGCCCTTTAAGTCT | 596 |
| 6 | M88458 | CTTTGAGGGCTTCTTTGACCT | 396 | TTATGCTGGCAAACTGAGCTT | 597 |
| 7 | L13463 | GCCCAGAAAAGGGTATACAGC | 397 | CTGGGCTCCCTTTTACATTTC | 598 |
| 8 | U21551 | GTGTACCGGAGAAGGAGGATC | 398 | TTATTGGGGTCTGGTTTTTCC | 599 |
| 9 | AF000560 | TATTAGGGCCCGTTCACTTCT | 399 | CCTCTGCAGTTCTCTCCATTG | 600 |
| 10 | AF102265 | TGATCATGTCATGTTTCGCAT | 400 | CATTTGCTAAACAGGTGGCAT | 601 |
| 11 | X06272 | ATGGCACCTCTCCCTAGGATA | 401 | CTGATGCTTTGGGGTAAACAA | 602 |
| 12 | L40802 | ACAAGTGGCATTGGACTCATC | 402 | CAGTTTCCCAGTTTCCCTTTC | 603 |
| 13 | X13916 | GATTGCCTGGACAACAGTGAT | 403 | ACAAGTGGCATTGGACTCATC | 604 |
| 14 | AF009674 | AAGAGCTTCATAAAGGGCTGC | 404 | TGGTCACTACAGACTTTGGGG | 605 |
| 15 | M73077 | GTCGTGACTCCAGAGAAGCC | 405 | AGGTCCAGGTTGTGGTCTTG | 606 |
| 16 | U15655 | TGTAGTGATGGCACGTCAGAG | 406 | GGGATAGACTCGGAAGACACC | 607 |
| 17 | AB014520 | AAGGCCATTCTGAGTATCCGT | 407 | TGGTCTTCCAGATGTGTAGGG | 608 |
| 18 | M58603 | CAGGTCCAGGGTATAGCTTCC | 408 | TTTGTCACAACCTTCAGGGTC | 609 |
| 19 | X76104 | AAGAACCGAGAAGGAGAGACG | 409 | TTACCTCCATCTGACACCGTC | 610 |
| 20 | AI659108 | CACTGTCACAACCCCAATTTC | 410 | ACCACTGTACGGAATGTGAGG | 611 |
| 21 | U72649 | AGAGTGAAAAGGCCTCTCCTG | 411 | CCTTCCATCCTAACCCCAATA | 612 |
| 22 | M64571 | TACGGTATGTCTCCCTGCAAC | 412 | CCTTGGCTAGCTCTAAGGGAA | 613 |
| 23 | X77909 | GTGGGAGCGAAAGTTGTAACA | 413 | TTTGAGATGTGGAACCAGGTC | 614 |
| 24 | M34064 | GGGTAATCCTCCCAAATCAAA | 414 | TCCATACCACAAACATCAGCA | 615 |
| 25 | AL050345 | GGTTGGCAATAGAAGGTGACA | 415 | GAGCACCAAAAAGCTCATCAG | 616 |
| 26 | AB006622 | TACACCTCCACCACTCAGACC | 416 | GAAACCATAAGGGTCAGGCTC | 617 |
| 27 | AB029027 | AAGTATCACGAGAAGCAGGCA | 417 | CAGACAAGAGGCATCTTGAGG | 618 |
| 28 | U51903 | GCTGCAGTGGACCATATCAAT | 418 | CACAGCAATCAAAAGCTCCTC | 619 |
| 29 | AF041259 | AAAAACAAACCGATGTTGCTG | 419 | GGCATCTCCTTAAGCTGCTTT | 620 |
| 30 | AB026891 | ACCTTCCAGAAATCCTCTCCA | 420 | ACCTGGCAAAACTGAGGAAAT | 621 |
| 31 | AB007960 | GGGGCCATTGCTATAAATCAT | 421 | GGGCAAGAACTGTGTGCATAT | 622 |
| 32 | D63390 | TGAAACCAGAAGGGGACTTTT | 422 | CATAATCCACAGAAAGGCCAA | 623 |
| 33 | L10678 | TACCAACGGTTTGACTCTTGG | 423 | ACCTTGACTCTTTGTCCGGAT | 624 |
| 34 | X60708 | AAAAACACAGCAAGGGTGATG | 424 | TCTTTTAACAGGGCAAGCTGA | 625 |
| 35 | Y15521 | AATACTCTCTGCACGGCTTCA | 425 | GGTAGTACGCATCCTGGAACA | 626 |
| 36 | AI038821 | ATCCAATAATTGGGTGGGATC | 426 | AGGCTGTGCACAGACTGTCTT | 627 |
| 37 | X84740 | CAACACGAAGACCCAGATCAT | 427 | AAATGCGACTGAAAAGCTTCA | 628 |
| 38 | M23115 | AACATGAAACAGTTCATCCGC | 428 | GCAGCTGAACAGGAATCAAAG | 629 |
| 39 | U79287 | GCTCATGCTCCTGTACTCGTC | 429 | CCATGCCAGAAACTTGTTGTT | 630 |
| 40 | Y12781 | CTCTTCCTTCTGTTGCTCCCT | 430 | CGTGGGAGATTGTGTCTTCAT | 631 |
| 41 | K03498 | ACAGATGAAGTTGCCATCCAC | 431 | AGCTGCAAGCAGCATACTCTC | 632 |
| 42 | AF030335 | TACTGGTGGTTGAGTTCCTGG | 432 | CAGCTGGACAGAGAAGACCAC | 633 |
| 43 | X93209 | GATGCAATTGACCGTGAAGTT | 433 | TCTAGCAAGGCTTCCAAACAA | 634 |
| 44 | AF068744 | GACAGCGAAGGAGACTCGTTT | 434 | TGAAACAGAATCTGGACCCTG | 635 |
| 45 | AF072247 | TCTGTCCCAGCTCCTTGAGACT | 435 | GACGTGCCTCGACTGTGTTA | 636 |
| 46 | U41344 | TTCCACCCAGTTGAAAGACAC | 436 | GAGAGAAGGGGACACCAAGTC | 637 |
| 47 | D13413 | GGAAGAGGAGGAGGAAGGAAT | 437 | ATCTTCCCCTTCCTGGAAAC | 638 |
| 48 | M69023 | CTGGCATTTGAGCTATTCAGC | 438 | TCAACTATGCATAGGTTCCGC | 639 |
| 49 | J04599 | CTGAAGTCTGTGCCCAAAGAG | 439 | ATCTTGTTGTTCACCAGGACG | 640 |
| 50 | U79267 | GTCAGCGAGATGGTGAAGAAG | 440 | CAGACAAAGACAAAGGCTTGC | 641 |
| 51 | AF155654 | AGAAGGCTGAGGAGAAAGCC | 441 | CTGTGAACCACCGATCTCCT | 642 |
| 52 | X12794 | CAGGACTCTGGCTTCTCTCCT | 442 | CTGTCCTAGGATTGGACCCTC | 643 |
| 53 | U51166 | TTTCAGTGGCATTCCTAATGG | 443 | CTGCAGCATTTAAGCAGAGCT | 644 |
| 54 | L07261 | GTGACTGCATCCAGTTTGGTT | 444 | TGCAGCATAAATTGCAGAGTG | 645 |
| 55 | U97188 | AAACCATGTGATTTGCCTCTG | 445 | GCATTTTCTTTACGGTGGACA | 646 |
| 56 | L37033 | ATCCTCAACCCCATCCAGTAC | 446 | CAGCTCACTCAGGTCATCCTC | 647 |
| 57 | Y09846 | ACCTCATCAGCTACCACATGG | 447 | AGGGCATCTTCTGGAAGAGAG | 648 |
| 58 | AF093420 | ATCTCCTGTCTGGTCCGAGAG | 448 | TGCTGATTTGACCTTGAGCTT | 649 |
| 59 | U19775 | CGAGCTGTTGACTGGAAGAAC | 449 | TCGGCATCTGAGTCAAAGACT | 650 |
| 60 | J04027 | TAAAGCAGTTATGTGGGGACG | 450 | AGGGAAGCGAGTGTATCCATT | 651 |
| 61 | Y18483 | CATCAACTACGTGGGCTTCAT | 451 | CTCTGACCACAGGCTGAAGAC | 652 |
| 62 | U57352 | AGGATGAGTACCTGCCCATCT | 452 | TATGTGAGCCTCTGCTCCTGT | 653 |
| 63 | U34994 | CAGAAACGATCAACACGGAAT | 453 | GGTCTAACATGCCGTTCAAAA | 654 |
| 64 | X79067 | TTGCAAAGGCATCTTCTCAGT | 454 | CTGCCTTTGCTTTTTCTTGTG | 655 |
| 65 | AB011535 | TCTAGAGCAGTGACCCTGGAA | 455 | AGTTGAGCCAGCACAGTCAAT | 656 |
| 66 | U90902 | ACTGTACCCTTCCCTCTTCCA | 456 | GACCAGCCATAGACCAAAACA | 657 |
| 67 | AB009282 | GAACTGTGGCTTGTGATCCAT | 457 | TCGGATGGATATCACCAATGT | 658 |
| 68 | AJ001685 | TCAGGCTTCCTAAAAGTTGCA | 458 | TTTCAACCTCCCTTAGGCATT | 659 |
| 69 | S37730 | TCCCTCGCACATTCAGATAAC | 459 | TAACCACAGCCCTACTCCCTT | 660 |
| 70 | U37518 | AGAGAAGGAAGGGCTTCAGTG | 460 | ATCTGCTTCAGCTCGTTGGTA | 661 |
| 71 | AC005329 | CTCCTTCTGCTGACATTGGAG | 461 | GCAATGTCTGAAAACACGGTT | 662 |
| 72 | AB009426 | TGTGGCTTGGAGATGAATAGG | 462 | TTTTGGGGTACCTTGTGAACA | 663 |
| 73 | X70340 | GAATGACTCAAATGCCCAAAA | 463 | AAGCCTGGTAAATCAATGGCT | 664 |
| 74 | U81561 | GTATGACCGAGGAGTCCCTTC | 464 | ATGTCGATCAGGACGTAGGTG | 665 |
| 75 | X70040 | CACACCCCTGCCTATTCTGTA | 465 | GTGGCACACAGGATTCATCTT | 666 |
| 76 | AB000449 | ATGGCCTTGCTTATCGGTACT | 466 | CCATTGGATCATGCAATAACC | 667 |
| 77 | D87119 | AAGGAACAGTTGGCCAAGAAT | 467 | GTCTGTGTGCACCGAATTTTT | 668 |
| 78 | X06745 | AATGCTACCTGTGGTCGAATG | 468 | TCTTTCCAGGTGTGTTCCAAC | 669 |
| 79 | X78817 | AACAAGACTCTGAAGGCGACA | 469 | GTCTGAGCTGGTGGACTTGAG | 670 |
| 80 | AF070530 | ACCACATGTGGAACCAGAGAG | 470 | TGACCTCATCTTCCACTGTCC | 671 |
| 81 | L43821 | GACAGGCCATGGCTACGTATA | 471 | ACTGAAAACACAGGGCCTTTT | 672 |
| 82 | AF007156 | CCCACCATAGAATTTCTGCAA | 472 | AGACTGAAGCCTGTCCTGTCA | 673 |
| 83 | AB014566 | AGGAGGAAGAAGAACGTCGAG | 473 | GTCAAACACTTCTCCTGAGCG | 674 |
| 84 | U71364 | ATTGTTGATGCCTTCCAACAG | 474 | CCTTCTTCATTCACCTCCACA | 675 |
| 85 | U93305 | TCTACCTGCCACCCCTACTTT | 475 | GCCTGTGCATCTATTCTCTGC | 676 |
| 86 | AB006626 | AGAACGGTCTTGGGACTTGTT | 476 | CAGAGGGCTATGCAGAGAATG | 677 |
| 87 | M31682 | GCAATGACCGTTTGACTGTTT | 477 | ATTTAGCCCCCTCTTCTCTCC | 678 |
| 88 | AF031824 | AAGACCACAGCCATGACAAAC | 478 | TGTTAGGAGGTGCTACCATGC | 679 |
| 89 | AF035299 | GAGGGCTCTACCTGAGAAGGA | 479 | GGATTGTCCTTCCCTTGACTC | 680 |
| 90 | X82207 | TAACCCTTTTTGGTCTTGGCT | 480 | CATGTCCTGTGTAGAGGGGAA | 681 |
| 91 | U84570 | GTTAGGTACTGGCTAACCGGG | 481 | AAATCCTCCCTTTAAGAGCCC | 682 |
| 92 | AA873266 | GGGAAAGTCCAGGTGGTAGAG | 482 | AAGATTGCCTTCTGCAAGTCA | 683 |
| 93 | X90976 | CCATGTCTGACCTGCAAAAAT | 483 | AGGCTGGTTTTGAGTTGGAAT | 684 |
| 94 | D89377 | CTCCAGCTTCAGTCTCCCTTT | 484 | GGTCTTCCTTAGGACAGGTGG | 685 |
| 95 | M57730 | CTGGAACAGTTCAAATCCCAA | 485 | CAGCTGGTACTCCTCATGCTC | 686 |
| 96 | U68111 | CAAGTGACCAACAGCAAAACA | 486 | TGTGAAGAACAAGAAGCAACG | 687 |
| 97 | L07540 | AGTCAGACATTGCCAACATCC | 487 | CTCAATGTCTGCCATTTTGGT | 688 |
| 98 | M65066 | AGAGTGGGTGACCAACATCAG | 488 | GAACTCCTCGTACATCTTGCG | 689 |
| 99 | M34182 | AAGCCCAGATATTTGGAGGAA | 489 | GTTTAAAACAGGCAGAAGGGG | 690 |
| 100 | L34059 | CCATGGAGGTCTTCAGCATTA | 490 | TGTCATTCATGTCGATGACGT | 691 |
| 101 | L25665 | ATCGATACCGACTGCATTTTG | 491 | TCGAGGAAAGTCCAGAACTGA | 692 |
| 102 | AL050290 | GGACTCCGGAAGGTTACAGTC | 492 | AACCAACAATGCTGTGTCCTC | 693 |
| 103 | X67325 | ACTCTCCGGATTGACCAAGTT | 493 | CTGGCATGGTTCTCTTCTCTG | 694 |
| 104 | AA595596 | TCACCACAGCTGAAGGAAATT | 494 | TGGGAGTACAGTGCCATTAGG | 695 |
| 105 | AF003837 | CCTGTAACATAGCCCGAAACA | 495 | AGTTGTCTCCATCCACACAGG | 696 |
| 106 | M87339 | TTCCCTGGGTGGAAAAATATC | 496 | CAGGTGGTCCGTAAAACAAGA | 697 |
| 107 | AI813532 | TCTGACATCTTGATTCCAGGG | 497 | GGCAGGGTGATAAATTGTTGA | 698 |
| 108 | AB018306 | AGCGGAAAATGAAGCTAGAGG | 498 | GATCCGTTCATAGATCCCCAT | 699 |
| 109 | AI761647 | GAAAAGACCCAAGGTTTCTGG | 499 | CCAAAGGCTGGTAGGAGATTC | 700 |
| 110 | X80507 | CAACTGCAGATGGAGAAGGAG | 500 | GACACTGGATTTTGAGTCCCA | 701 |
| 111 | Y16241 | TGGTTTGGCAACAGGTATCTC | 501 | GAAAGTCAGGTGCATGCTCTC | 702 |
| 112 | D67031 | TGAATATGGGTTCCCATCAAA | 502 | GTGCCTAGGCTTCTCTCGAAT | 703 |
| 113 | J05581 | CCAGTCTCCTTTCTTCCTGCT | 503 | CAGTAGAGCTGGGCACTGAAC | 704 |
| 114 | U19718 | CTCTTCCTGCTATTCCTGCCT | 504 | TAGTCTGGGTTGTCGATCTGG | 705 |
| 115 | U52840 | GTTCATTCTGGTGCATGAGGT | 505 | CTGCTTGAGGTCTGATTCAGG | 706 |
| 116 | AB014557 | GTTTGAGTGCAGGACAGAAGG | 506 | ACACTCGGAAGTTATGGCATG | 707 |
| 117 | AF038172 | TTACAGCTTGAGGGAAAAGCA | 507 | GGCCCAAAGCATCTGTAATCT | 708 |
| 118 | AB014529 | CTGAAGCCATTGAAAAAGCTG | 508 | CTAACAGCATGCCCAACATTT | 709 |
| 119 | U65676 | AGGCTTTCTCCAAAAGTGAGC | 509 | TCAGAAAGTTCAGCCGGTAGA | 710 |
| 120 | U14971 | TTGACTTCTCTCTGCGCTCTC | 510 | TGTTTATTTGGCAGGAAAACG | 711 |
| 121 | X74331 | CCAAACCAAGTGTCCAGAAAA | 511 | CAGGCTATTGAGGAAAAAGGG | 712 |
| 122 | D16815 | GTGAATGCAGGAGGTGTGATT | 512 | CCTTCAATATTGGCGAGATCA | 713 |
| 123 | M14333 | CCTCTGTGAAGCATTCGAGAC | 513 | GGATTGTTGGCACTGGAGTAA | 714 |
| 124 | M28668 | ATTATCACCAGCACCAGTTCG | 514 | GGGTTGACATAGGTGCTTGAA | 715 |
| 125 | W29065 | GAGAGAATAACCATCCGGGAC | 515 | AAGATGGGGAGATGTGGAAAC | 716 |
| 126 | AL050025 | CAGGTACGAATTTTGCGGTTA | 516 | TCGCAATCCACTCTCTGACTT | 717 |
| 127 | AF000561 | TACGAGTGCAACATCTGCAAG | 517 | TCTTCAGGTCGTAGTTGTGGG | 718 |
| 128 | AB008515 | ATGGGAATTGGTCTTTCTGCT | 518 | CACAACAGCCAATGACATCAC | 719 |
| 129 | AJ011736 | GAGGTCCTGGATAGCTCCAAC | 519 | AAGCTTCTGTCCCCTGAAGAG | 720 |
| 130 | J00277 | GCTGAAAGGAAAGCAGATGTG | 520 | GGACTTCCCAGTCTTGTCCTC | 721 |
| 131 | Y10055 | AGGCCTCATTGAGGTGGTACT | 521 | CTTGGACTTCAGCCAGTTGAG | 722 |
| 132 | W26652 | TTTTCCGTTGCAGCTGTTAAT | 522 | CTCACTTAGCGAAAGTGACGG | 723 |
| 133 | M11717 | GACGAGTTTGAGCACAAGAGG | 523 | AGGCCCCTAATCTACCTCCTC | 724 |
| 134 | L32976 | ACCCTGAAGATCACCGACTTT | 524 | GAAGGTGGAGGCCTTGATAAC | 725 |
| 135 | M29893 | CTAGATGGGGAGGAAGTCCAG | 525 | GAGAAAACACAGAGGAACCCC | 726 |
| 136 | S70154 | TGAGATGCCACTGACTGACAG | 526 | CTTGCCATTTTGTGGCTACAT | 727 |
| 137 | D83542 | ACTTCATCAATGATGGCTTGG | 527 | CCCCCAGTCTCTGAGGTAGTC | 728 |
| 138 | Z74615 | GTACATCAGCAAGAACCCCAA | 528 | TGGTAGGTGATGTTCTGGGAG | 729 |
| 139 | M96684 | GACTACGGAGTGGAGGAGGAG | 529 | GCATAAACACGCCGTACTTGT | 730 |
| 140 | D12763 | CCTGTGCCATAAAATGTGCTT | 530 | GGGAGGACGAACAATTTAAGC | 731 |
| 141 | S67070 | AGCCATAGTTGAGCCCTGATT | 531 | GATGCTGCTACCTCTGGAGTG | 732 |
| 142 | X66435 | CTCACCTCAGCATTTAGCAGG | 532 | GTGCCACACCAGTTCTTGAAT | 733 |
| 143 | U25138 | AAGTCATTGCCTGCTCAAGAA | 533 | CAGTTGAGTGGGGACAGGTAA | 734 |
| 144 | D85131 | ACTGGTGAGGTTTGTCCAATG | 534 | GGAGCTTGTACCAAGGGACTC | 735 |
| 145 | M36089 | CAGACAAAGATGAGGCAGAGG | 535 | CTGTGACTGGGGATGTCTTGT | 736 |
| 146 | AC004472 | TCTACTCTCAACTCCAGGGCA | 536 | TGGAGCTGACCTGACAGAGAT | 737 |
| 147 | AB009010 | GAATGTCAAGGCAAAGATCCA | 537 | TGATGGTCTTACCAGTCAGGG | 738 |
| 148 | D26158 | CGCTTTGACAAGAGGATTGAG | 538 | TGACTGGTAGAGGTGGGTGAG | 739 |
| 149 | AL035307 | CTTTGTCATCATTGCCCAACT | 539 | TGGTTCATTTTGGCTCTCATC | 740 |
| 150 | AL043470 | TACACTTCCACAGTCAGCACG | 540 | AAGGACAGGTATGATGATGCG | 741 |
| 151 | U67733 | CAAGTACTACCTTCCTGGGCC | 541 | TGCTCAGACAAAGAATGGCTT | 742 |
| 152 | D28118 | TCACCATCACATCTCCAATGA | 542 | TTTACCAAGGCGGTGATGTAG | 743 |
| 153 | AB020661 | CATTAGGACACGTCATGCCTT | 543 | GAGTTGATCATCGTGGCATTT | 744 |
| 154 | W72186 | TATAGCAACAGCGTGTGCAAG | 544 | TTTCATGCACACACACACATG | 745 |
| 155 | U97067 | ATGAGCACAGAGAACGCATCT | 545 | GTTCTTCAGCGATGCTTTTTG | 746 |
| 156 | AF061261 | CCCAAAAGTTGTCAGGTTGAA | 546 | TTTTAAGTGTGTCGGAGGGTG | 747 |
| 157 | AB007870 | ACATGAATATGGGCACAGAGC | 547 | TCTGCAGCCTTCAGAACAAAT | 748 |
| 158 | AB014519 | CTTAGCAATGAGATGCAAGCC | 548 | GCATTTTTGTGCTGAAGAAGC | 749 |
| 159 | AB011123 | CATTGAGTTGAGCTGGCCTAG | 549 | GCTTGTTTCCCAGAAGCTCTT | 750 |
| 160 | U09578 | TTTCATGGCTGATCAGAGCTT | 550 | TAAAACCCAGCAGTGTTGTCC | 751 |
| 161 | Y17711 | TCTGTGTTAGTCCCTGGGATG | 551 | GCTCACTAAGCACAGGGTCAC | 752 |
| 162 | L13972 | TCCTCTCGGTCATCTTCTCAA | 552 | TGGGTTGTTCTCCCAGTAGTG | 753 |
| 163 | AF055009 | CAAGTACCTGAGTGAGGCCTG | 553 | AGCAAGAACTCCTCTTCTGGG | 754 |
| 164 | AF007155 | TTCCAGAACTTCTCCCTCCAT | 554 | GAGGCACTCAGTCTCCCTTCT | 755 |
| 165 | AB018324 | AGCACCTTATCCGAAGGATGT | 555 | AGTCGCAGAACCTGCTCATTA | 756 |
| 166 | AB023154 | ATGAGGTCCACCACAAGACAG | 556 | AAAGCTTTTCTGGCCTCAGTC | 757 |
| 167 | X78992 | ATCCAGAAACATGTCGACCAC | 557 | GCATGTTGTTCAGGTTGAGGT | 758 |
| 168 | M60299 | CTTGCTCCTTTCTTTTGCATG | 558 | ACTCCACTGAACCCCTCTGTT | 759 |
| 169 | M80482 | TAAAAAGTGCGTGGATGAACC | 559 | GTGAATGCACTCTTCTCTGCC | 760 |
| 170 | U47025 | GGTCAGTGACGAGGTGTTCAT | 560 | GGATCCTCTTCACATGCACAT | 761 |
| 171 | Y10032 | AGGATGGGTCTGAACGACTTT | 561 | AAGGGTTGGCATTCATAAGCT | 762 |
| 172 | U57057 | GGGAACTGTTTAAGGGTGAGC | 562 | CACGGAGTCGTAGCAGTTCTC | 763 |
| 173 | X90392 | CTCATTTGTCCCAACAGCATT | 563 | TGAGTTAGGGGTGTTTGATGC | 764 |
| 174 | AA418437 | GAGACAGGGCTGTGTTCTGAG | 564 | AGCAGTAGCAGTGAGAGCGAG | 765 |
| 175 | X84373 | TCCTCCTTGCGTAGAAGTTGA | 565 | ATGGTTTTCTGTGGTGAGTGC | 766 |
| 176 | XM_212189 | TGTTCACTTTTGTTGCGGAG | 566 | CTGCATGGAGAAGATGACGA | 767 |
| 177 | AF109134 | GGGAGGTCGAGGTGTTTAAAA | 567 | GGAAGCGCTTCTGGTAGTTCT | 768 |
| 178 | M64788 | ATTTGGGTTCTGCTGTGTGAC | 568 | AAGGCAGGTGCATGTAATCAC | 769 |
| 179 | U43368 | AAGAGGGGTCACATACCAGCT | 569 | GGGGTCACAGTTCTTGTACCA | 770 |
| 180 | X13293 | ACCAGTCTGTCCTTCCTGGAT | 570 | GCTCCAATGTGTCCTGTTTGT | 771 |
| 181 | AB014511 | CTCAGTATCGTCTCCAGCCAG | 571 | ATAAAGCGGGATCACACCTCT | 772 |
| 182 | AB014585 | CCGTGAGGAGAGGACAGAAG | 572 | CACTTCTGGAACAGGTGGGT | 773 |
| 183 | AB011114 | CGATTCCATCATGTCACTGTG | 573 | CAGCAGCATGTAGTGTTTCCA | 774 |
| 184 | U80040 | CACTTCCGTGTTCCCTTACAA | 574 | TAGTTGGTCATAATGGCAGCC | 775 |
| 185 | M64174 | TGAAGCCTGAGAGTGGAGGTA | 575 | CTCCGTCTTCTGTGCAGATTC | 776 |
| 186 | Y00971 | ACTTGTGGCCAATATGCTGTC | 576 | GCTCCGCATACAAATTATCCA | 777 |
| 187 | AL050065 | CCTTTCATGTCTCCCACTGAA | 577 | GCCCACAGATACTTGACCGTA | 778 |
| 188 | AF029670 | TCCGAGCTTAGCAAAGAAGTG | 578 | CCTGCTCAAGAAGTTCCAGTG | 779 |
| 189 | X63629 | TGTTGAATAAGCCACTGGACC | 579 | GTAAACTTGGGCTTGTGGTCA | 780 |
| 190 | AB028957 | TGTTGTGACGTTGAAAATCCA | 580 | AGGGCATTCTTTGGCTAATGT | 781 |
| 191 | X74837 | TTTCGAAAGAAAGCAGTGGAA | 581 | GGGTTTCCTGATAAGTGGCTC | 782 |
| 192 | AB018273 | ACGACGTTGGATGAAGAAATG | 582 | CCTCCTCAGGCTTCAGAAGTT | 783 |
| 193 | Y15227 | AAATACGGGTCCTGCTTAGGA | 583 | GAGGCTTAAGTGCGATAACCC | 784 |
| 194 | Y12661 | TCTATTTTTCAGTCTCCGGCA | 584 | TACCGGCTCTTTATGCTCAGA | 785 |
| 195 | AL049365 | TTCTTGGTCTTGGAACTCCCT | 585 | TTAAAGTGCCAGTATCGGTGG | 786 |
| 196 | Y11395 | CAGGATCAGCTTCCTCCTTCT | 586 | TTCACAAGAAAGGCAGAGCAT | 787 |
| 197 | NM_004713 | GGTGACTCGAGCAGTGATGA | 587 | TTTGGGGTTGAAGGTGAGAC | 788 |
| 198 | X76029 | TGGAGGAGCTTTGCTTTATGA | 588 | CAACATTTGACTTGCCCAACT | 789 |
| 199 | AF045583 | TCTTCTTGCAGCTAGAAAGCG | 589 | CAGATGCCACGGTCATAAACT | 790 |
| 200 | X85545 | ACCTTTTCTTCACGTGGAGGT | 590 | TGAGAAGCACAGGCTGAAAAT | 791 |
| 201 | X12534 | CAGAGCTTCCAGGACATCAAG | 591 | GAAGTTTCCATAAAGGGGCAG | 792 |

[0312] The contents of all patents, patent applications, published PCT applications and articles, books, references, reference manuals, abstracts and internet websites cited herein are hereby incorporated by reference in their entirety to more fully describe the state of the art to which the invention pertains.

[0313] As various changes can be made in the above-described subject matter without departing from the scope and spirit of the present invention, it is intended that all subject matter contained in the above description, or defined in the appended claims, be interpreted as descriptive and illustrative of the present invention. Many modifications and variations of the present invention are possible in light of the above teachings.

The application's sequence listing, which the Patent Office published only in electronic form, follows.

SEQUENCE LISTING (795 sequences)

SEQ ID NO: 1 - DNA, 4103 bp, Homo sapiens
tgtggcgacggcggcagctgtggccccggcgccagcgcccggcacggacagcgcctcttcggtgcactggttccgcaaagggctgcgactccacgacaacccggcgttgctggcggccgtgcgcggggcgcgctgcgtgcgctgcgtttacattctcgacccgtggttcgcggcctcctcctcagtcgggatcaaccgatggaggttcctacttcagtctctggaagatttggacacaagtttaaggaaactgaactcccgcctgtttgtagtccggggacagccagccgacgtgttcccaaggctgttcaaggaatggggagtgacccgcttgacctttgaatatgactctgaaccctttgggaaagaacgggatgcagccatcatgaagatggccaaggaggctggtgtggaagtagtgacggagaattctcataccctctatgacctggacaggatcattgagctgaatgggcagaagccaccccttacatacaagcgctttcaggccatcatcagccgcatggagctgcccaagaagccagtgggcttggtgaccagccagcagatggagagctgcagggccgagatccaggagaaccacgacgagacctacggcgtgccctccctggaggagctggggttccccactgaaggacttggtccagctgtctggcagggaggagagacagaagctctggcccgcctggataagcacttggaacggaaggcctgggttgccaactatgagagaccccgaatgaacgccaactccctcctggccagccccacaggcctcagcccctacctgcgctttggttgtctctcctgccgcctcttctactaccgcctgtgggacctgtataaaaaggtgaagcggaacagcacacctcccctctccctatttgggcaactcctatggcgagagttcttctacacggcagctaccaacaaccccaggtttgaccgcatggaggggaaccccatctgcatccagatcccctgggaccgcaatcctgaggccctggccaagtgggctgagggcaagacaggcttcccttggattgatgccatcatgacccaactgaggcaggagggctggatccaccacctggcccggcatgccgtggcctgcttcctgacccgcggggacctctgggtcagctgggagagcggggtccgggtatttgatgagctgctcctggatgcagatttcagcgtgaacgcaggcagctggatgtggctgtcctgcagtgctttcttccagcagttcttccactgctactgccctgtgggctttggccgtcgcacggaccccagtggggactacatcaggcgatacctgcccaaattgaaagcgttcccctctcgatacatctatgagccctggaatgccccagagtcaattcagaaggcagccaagtgcatcattggtgtggactacccacggcccatcgtcaaccatgccgagaccagccggcttaacattgaacgaatgaagcagatttaccagcagctttcgcgctaccggggactctgtctactggcatctgtcccttcctgtgtggaagacctcagtcaccctgtggcagagcccagctcgagccaggctggcagcatgagcagtgcaggcccaagaccactacccagtggcccagcatcccccaaacgcaagctggaagcagccgaggaaccacctggtgaagaactcagcaaacgggcccgggtggcagagttgccaaccccagagctgccgagcaaggatgcctgagactgcagagcccttgctccgtgagcaaagcctgggtgcccaagcagccaccgcagcagcagagtacaacctgcagagaagctgatcaccgggcagagatagagcgagcatgtgtgtgtgtgtgcgcgtgtgcagaggagggagtggtgtgcctgtttgtgtgtgcatgcatctgttgacactcatgattctgaatgttgcctgggctgggggagtacctgtagcacgccagtgctgtttcccggcctccagacacaaggctcgaggttatggcagtgactttcagctgagacctgttcctgcaagccagctgccttgtctgaacagaacgtagtggtaggaccctagctgggattctggcatctgcctccctagacctccttccctccctcctcacgtcaggctgtggagcaggagcacagcagttctggctgttgtccaaagcatgggattctggaggcagccagagccctgctgagttcctgctttctgacctggaggctgagcaggccggagtggatggatgctgtccagacgtagccacctggcctctgtttcttattttaaaattctctgctactgggctcagtcccaggcccttccttgggcttctgggactgagcatgaggccatagacagatctaaaaagtttccaccaccctacagaagtacacacagatacctgactggtgtggggtatgcctggtactgtaataggagcctaagacagcacacctaccttttcaggatttagaacctaaaattagaaagagaatcccagctgtcattgttccttccccagaagctaagagccagcctcagagcctacccaggagctgtgaaggggcaagggtcaaactgactcactctaccaggaggagaccaggttgcagtggcgtaaggccccctggtttctctggccacactccaaggcaccacagtgctgccagtgaggacagctgacacccagccagggaaaccattctagtctttattctgttggcttccagggcctgtcctggacttgtcagcatccagactgccatgtcagctatcccagtagctgagctccaaggactcaggcagagggactcagggatggggactgccaggggcagttggcaaaagtccaagtagagattacacccagcacaccattccttccaggagcagtaggtgggaggtttgacccagagaagccaatccttgcattccaggagtggcctgtgcctcccacctcttccttcccactgccaaaggcctgtgttgagaaagatgtcatgcaaaaggacgacggtggccaactaaagcaagtcttccttccaccctgtggcctgcacttgagccacaaagtgtgtgtgtgtgtgtgcgtgtgtggtacgtgtgtgtgtgtgtggctatgaggctgattcctgtttggatttttgtcctcacgtgtatcattaagctggcctttgggccttttcctttctacctcccctgtgacctttcctagcctcagatctgttaattcttttggccccagccctgtccctcactgtcctctgtccttggaccagaaccctggggtcagacccatctcctgtagctgtccatcacactgacaggcttcttcctgagatatcctcaggttttctcagccagagagctgcctttagagtccaactgttgtacgtatgtcaccttcactagaaatgtcccatcatcgtgggaggggagcagggcacaggggatggtgtgcattcagagcattgggttgggggcttccctgttccctcagccccagtcgagaggaaagagaatcgggccactgccagaaagagagtcaagcaaacctggaagggcaaatctgagagtgggaaggccaaaggccgaggcccagatttagtattcactagcagcgccttcgggtagcaggatgattccttttcctgcctgtctgctgctggctctcttccctaaggtacaggttggcaggaccacctccgcctacttctccaccatccctagcatgccagcccgttcccagatcaacctgccagtggagtcaggcagtgcactcctggagccaagagggaagggcagggtagagagggtatgtccagtagcctggagctccatggtggcttcatgcctcccttctcccagctcaggtggccctgagggctccctcggaacagtgcctcaaatcctgacccaagggccagcatggggaagagatggttgcaggcaaaatgcactttatagagattttctattgctgggaaggtgtgtttctcccacaatttgtttgtgaatattcacttgttttataaatgtctgacctgtcttg

SEQ ID NO: 2 - DNA, 2358 bp, Homo sapiens
ggagaggatcccggagccggtgagaattctctgttttttctctaccatcctttccaggccttttcctcacctaatgagtcgtagagacgagggcccagagagtctgtaaagtggctggtgaaagattagtgtcccagggccctacatccgggaggtggttcgggataaagagaactagtcttgggaacaatgtaggtgggaacttaagggaatgggagagcggcccatagaggtggacggagggcgcgattggagtaaagcggaccctgtgtaggtatagagttgagtcaagtggagtcactgcctctgtccctctggtcagcgtgatggccagaggcctggggggcccccactgggtggccgtgggactgctgacctgggcgaccttggggcttctggtggctggactcgggggtcatgacgacctgcacgacgatctgcaagaggacttccatggccacagccacaggcactcacatgaagatttccaccatggtcacagccatgcccatggtcatggccacactcacgagagcatctggcatggacatacccacgatcacgaccatggacattcacatgaggatttacaccatggccatagccatggctactcccatgagagcctctaccacagaggacatggacatgaccatgagcatagccatggaggctatggggagtctggggctccaggcatcaagcaggacctggatgctgtcactctctgggcttatgcactgggggccacagtgctgatctcagcagctccattttttgtcctcttccttatccccgtggagtcgaactctccccggcatcgctctctacttcagatcttgctcagttttgcttccggtgggctcctgggagatgctttcctgcacctcattcctcatgctcttgaacctcattctcaccacactctggagcaacccggacatggacactcccacagtggccagggccccattctgtctgtgggcctgtgggttctcagtggaattgttgcctttcttgtcgtggagaaatttgtgagacatgtgaaaggaggacatggtcacagtcatggacatggacacgctcacagtcatacacgtggaagtcatggacatggaagacaagagcgttctaccaaggagaagcagagctcagaggaagaaggaaaggaaacaagaggggttcagaagaggcgaggagggagcacagtacccaaagatgggccagtgagacctcagaacgctgaagaagaaaaaagaggcttagacctgcgtgtgtcggggtacctgaatctggctgctgacttggcacacaacttcactgatggtctggccattggggcttcctttcgagggggccggggactagggatcctgaccacaatgactgtcctgctacatgaagtgccccacgaggtcggggactttgccatcttggtccagtctggctgcaccaaaaagcaggcgatgcgtctgcaactactgacagcagtaggggcactggcaggcacagctgtgcccttctcactgaaggaggagcagtggacagtgaaattgcaggtggtgcaggtcctggctgggtcctgccatttactgcaggtggctttatctacgtagcaacagtgtctgtgttgcccgagctgctgagggaggcatcaccattgcaatcacttctggaggtgctggggctgctggggggagttatcatgatggtgctgattgcccaccttgagtgaggggtggataaactaccctgccccaaacctctacccctaactccaggtcaggggtgcgtagaggttgggggccctggccagggacatctgccaaaggaaggaactgtagcctgggagcaatggttactttggcattagggccttcaagggctggcagtcttacagaggctggagcggtgagaatgagaggccagagggaccatagtgttgggcactgtctgaccatgttgcatttggaaggctaaatggggccatgaagaaggctggaagggacagggggtgatggcagcctacctggtgtcccctaccccacctgttctcggagaaccaagttgctacacaggaagttctccaaggtccagtttcctttctcccaccagttggtggaggcttcagggaagaccagagtcctggacagagagggtaacaggaggagtcggggataaacatcaaacatcaatcgtgtgtcctgatttgggagtgattggggggatggggtgggagagggttaattggtattctcatggcctgattttttttgtttctattccttttatatcactgtgtttgaatcgagggggaggggtggtaaccggaaataaagacctccgatcttccgcccc

SEQ ID NO: 3 - DNA, 1547 bp, Homo sapiens
ggggacttcttgaacttgcagggagaataacttgcgcaccccactttgcgccggtgcctttgccccagcggagcctgcttcgccatctccgagccccaccgcccctccactcctcggccttgcccgacactgagacgctgttcccagcgtgaaaagagagactgcgcggccggcacccgggagaaggaggaggcaaagaaaaggaacggacattcggtccttgcgccaggtcctttgaccagagtttttccatgtggacgctctttcaatggacgtgtccccgcgtgcttcttagacggactgcggtctcctaaaggtcgaccatggtggccgggacccgctgtcttctagcgttgctgcttccccaggtcctcctgggcggcgcggctggcctcgttccggagctgggccgcaggaagttcgcggcggcgtcgtcgggccgcccctcatcccagccctctgacgaggtcctgagcgagttcgagttgcggctgctcagcatgttcggcctgaaacagagacccacccccagcagggacgccgtggtgcccccctacatgctagacctgtatcgcaggcactcaggtcagccgggctcacccgccccagaccaccggttggagagggcagccagccgagccaacactgtgcgcagcttccaccatgaagaatctttggaagaactaccagaaacgagtgggaaaacaacccggagattcttctttaatttaagttctatccccacggaggagtttatcacctcagcagagcttcaggttttccgagaacagatgcaagatgctttaggaaacaatagcagtttccatcaccgaattaatatttatgaaatcataaaacctgcaacagccaactcgaaattccccgtgaccagacttttggacaccaggttggtgaatcagaatgcaagcaggtgggaaagttttgatgtcacccccgctgtgatgcggtggactgcacagggacacgccaaccatggattcgtggtggaagtggcccacttggaggagaaacaaggtgtctccaagagacatgttaggataagcaggtctttgcaccaagatgaacacagctggtcacagataaggccattgctagtaacttttggccatgatggaaaagggcatcctctccacaaaagagaaaaacgtcaagccaaacacaaacagcggaaacgccttaagtccagctgtaagagacaccctttgtacgtggacttcagtgacgtggggtggaatgactggattgtggctcccccggggtatcacgccttttactgccacggagaatgcccttttcctctggctgatcatctgaactccactaatcatgccattgttcagacgttggtcaactctgttaactctaagattcctaaggcatgctgtgtcccgacagaactcagtgctatctcgatgctgtaccttgacgagaatgaaaaggttgtattaaagaactatcaggacatggttgtggagggttgtgggtgtcgctagtacagcaaaattaaatacataaatatatatata

SEQ ID NO: 4 - DNA, 4834 bp, Homo sapiens
cggcgcccgcgggctgggagccggggcccgcaggtggaagcgcacccgggaggcgggccggccggggctggagcggctcgggcgggctcttgacgctcagccagcttcgctccggcctcgggaaggcgcgcgtcccgccctgacccgccggcctctcccaccccagcagtgacgcgccgcctgggagctggagcccgcgcagcgccccgcagggcgatggacggccgaaccccgcgcccgcaggacgccccagccaggagaaaaccaaaagccaaggcaccacttcctccagctgagaccaaatatactgatgtctcttcagctgctgattctgtagaatccactgctttcatcatggaacagaaagaaaacatgatagataaagacgttgaactctcagtggtcctacctggggatattatcaaatctactactgttcatggcagtaaacctatgatggacttgttgatattcctttgtgcacagtatcacttaaatccatcaagttacacaatcgatctgttgtcagctgaacagaaccacattaaatttaagccaaacacaccaataggaatgttggaggtagagaaggtaattttaaagccaaaaatgttggataagaaaaaacctacacctataataccagagaaaactgtgagagtagtgattaattttaagaaaacacagaagaccatagtgagagtgagtccacatgcatcgcttcaagagcttgcccctattatatgtagcaaatgtgagtttgatccgttgcatacactattgttgaaagattatcaatcgcaggagcctcttgacttgacaaaatctcttaatgacctgggactaagagaattatatgcgatggatgtcaacagagagtcctgccaaatatcacaaaacctagatattatgaaggagaaagaaaataaagggtttttcagtttttttcaacgcagtaagaaaaagcgagaccaaactgcaagtgcccctgcaacccctctagtaaataagcaccgcccaacttttacaaggtccaataccatttccaaaccatatatttccaacaccctgccgtcggatgcacccaagaagaggcgggctccactgcccccgatgccagcatctcagagtgtcccccaagaccttgcacacatccaggagaggcctgcttcttgtatagtgaaatccatgagcgtggatgagacagataagagtccctgtgaagcaggaagagtgagggcaggttcactgcagctcagcagcatgtctgcagggaattcatctttgagaaggacaaagcgaaaagcaccttccccaccctccaaaatacccccgcatcaaagtgatgaaaatagtcgtgtgactgccttacagccagtagatggagttcctccagacagtgcttcagaagcaaactctcctgaggagctatccagcccagaaacctttcaccctgggctttccagtcaggagcagtgcactgcgcccaaactgatggaggaaacctctgtctttgagtgccctgggacacctgaggcagccataacatcattgacatctggaataagctctgattatagccttgaagagatagatgaaaaggaagaactgagtgaagtgcctaaagttgaagctgaaaatatttctccgaagtcacaagatattccttttgtatctactgatataataaatacactgaaaaatgatcctgactcagcccttggcaatggtagtggagagttctcacaaaactccatggaagaaaaacaagaaactaaaagcacagatggacaagaaccacacagtgtagtatatgatacaagcaatggaaagaaggtagttgacagtataagaaacttgaagtcgttgggcccaaaccaagagaatgttcaaaatgaaataattgtctatccagagaacacagaagacaatatgaaaaatggagtgaagaaaacagaaatcaatgtagaaggtgttgccaaaaataacaacattgatatggaagttgagagaccatcaaactctgaggcacatgaaactgatactgctataagttacaaggaaaaccatctagcagcttcatcagtaccagatcaaaaactgaatcaacccagtgcagaaaagacaaaagatgcagcaattcagacaaccccttcttgtaacagttttgatgggaaacaccaagatcataatttatctgactccaaagttgaagaatgtgtgcaaacttcaaataacaacatatcaactcaacactcatgcttaagttcacaagattctgtaaatacctcaagggaattcaggagtcaaggcaccctaattatacattcagaagatccgcttaccgtaaaagatccaatttgtgcacatggtaatgatgatcttttgcctcctgtagataggattgacaaaaattccactgcttcttacctaaagaattacccactttatagacaggactacaatcccaagccaaaaccttcaaatgaaattacacgagagtatatacccaaaattggcatgactacttataaaatagtgcctcccaaatccttggaaatatcgaaagactggcaatcagaaaccatagagtataaagatgatcaggacatgcatgctttagggaaaaagcacactcatgagaatgtgaaagaaactgccatccaaacagaagattctgctatttctgaaagcccagaagagccactgccaaaccttaaaccgaagcctaacctgagaacagagcatcaagtgcccagttctgtgagctcacctgatgatgccatggttagtcctctgaaacctgctcccaaaatgacaagagacactggcacagctccttttgcaccaaatttggaagaaataaacaatattttggaatcaaaatttaaatctcgggcttcaaatgcccaggccaaacccagctctttttttttgcagatgcagaagagagtatcgggtcactatgtgacatctgcagctgccaagagtgtccatgctgcccctaatcctgctccaaaagaactgacaaataaagaggcagaaagggatatgctgccttctccggagcagactctttctcccttaagtaaaatgcctcactctgttccacaaccccttgttgaaaaaactgatgatgatgtcatcggtcaggctcctgctgaagcctcccctcctcccatagctccaaaacctgtgacaattcctgctagtcaggtatccacacaaaatctgaagactttgaaaacttttggtgccccacgaccatactcaagttctggtccttcaccgtttgctcttgctgtagtgaaaaggtcacagtctttcagtaaagagcgcaccgagtcacctagtgccagtgcattggtccaacctccagccaacacagaggaagggaagactcattctgtaaataaatttgtggacatcccacagcttggtgtgtctgataaggaaaataactctgcacataatgaacagaattcccaaataccaactccaactgatggcccatcattcactgttatgagacaaagttctttaacattccaaagctctgacccagaacagatgcgacagagtttgctgactgcaatccgttcgggagaggctgctgccaaattgaaaagggttaccattccatcaaatacaatatctgtgaatggaaggtcaagactcagccattccatgtcccctgatgcccaggacggccattaaatgttaccctgccacaccactgcacttcacttccacttcagaccaacttcatactaatggaacattttggcaaatgtatattcagatgtacactaatatattatctattaaaatattagaatttgtgttgtggcttttaatgccagaagaaaagttaccagaatttataatttatagtaattttttgatcttttttttgccttaagagttgaatatgctgctttagaactttaaaacaaggtgtaaatgattttcattttttacaaatgaaaaataattcctttgtattgatttcacttaccagcacattctctacaatggtgacttagacaaaagtataagattcatagactttatatttgtatgacatacaactaggacaaacatagatatgacatttgctgcctcagtgtagcaattggaaatatttataagttatatgaaagcctgttttgggctgaaagaatgatttagaaaactagtgataccaaataagtatattcagttcaataattattttcaatgatgaatcacttagtgtgaaagacttgccttgtgtattctttatgtaattacaaatcactgtcaattttatgggaagctcatagtattttaatattttattaacatggaactcttgtttttttaatctttagaacttaaattctacaagaattttaaatattttctgtatataattatgacattgtcacacagaaattacacattttatgtgccagaagccttaaacatctttctgtgaaaatgctgatatattgtgacagttatttcacatttgatatgtagagaggaataggggttagtttatgtttatattgaaaaactttaaagactatttggaagttccagaaattctggttttaattcaagtaaaatgataaaatagtcattatatagttcagatgctaatattctaagtaataatatatatttacattgaagctaaaactgttaagcaaaacaatgcccatttgtcggcttacagctcttccggagtctagagcctgttggtgttctgtccctactttaagaatttaattgctcacttattctgaaagctttgttcaaacaagatgatattaaatttgttttcact

SEQ ID NO: 5 - DNA, 5102 bp, Homo sapiens
gcttctgcgactccagttgtgagagccgcaagggcatgggaattgacgccactcaccgacccccagtctcaatctcaacgctgtgaggaaacctcgactttgccaggtccccaagggcagcggggctcggcgagcgaggcacccttctccgtccccatcccaatccaagcgctcctggcactgacgacgccaagagactcgagtgggagttaaagcttccagtgagggcagcaggtgtccaggccgggcctgcgggttcctgttgacgtcttgccctaggcaaaggtcccagttccttctcggagccggctgtcccgcgccactggaaaccgcacctccccgcagcatgggcaccagcctcagcccgaacgacccttggccgctaaacccgctgtccatccagcagaccacgctcctgctactcctgtcggtgctggccactgtgcatgtgggccagcggctgctgaggcaacggaggcggcagctccggtccgcgcccccgggcccgtttgcgtggccactgatcggaaacgcggcggcggtgggccaggcggctcacctctcgttcgctcgcctggcgcggcgctacggcgacgttttccagatccgcctgggcagctgccccatagtggtgctgaatggcgagcgcgccatccaccaggccctggtgcagcagggctcggccttcgccgaccggccggccttcgcctccttccgtgtggtgtccggcggccgcagcatggctttcggccactactcggagcactggaaggtgcagcggcgcgcagcccacagcatgatgcgcaacttcttcacgcgccagccgcgcagccgccaagtcctcgagggccacgtgctgagcgaggcgcgcgagctggtggcgctgctggtgcgcggcagcgcggacggcgccttcctcgacccgaggccgctgaccgtcgtggccgtggccaacgtcatgagtgccgtgtgtttcggctgccgctacagccacgacgaccccgagttccgtgagctgctcagccacaacgaagagttcgggcgcacggtgggcgcgggcagcctggtggacgtgatgccctggctgcagtacttccccaacccggtgcgcaccgttttccgcgaattcgagcagctcaaccgcaacttcagcaacttcatcctggacaagttcttgaggcactgcgaaagccttcggcccggggccgccccccgcgacatgatggacgcctttatcctctctgcggaaaagaaggcggccggggactcgcacggtggtggcgcgcggctggatttggagaacgtaccggccactatcactgacatcttcggcgccagccaggacaccctgtccaccgcgctgcagtggctgctcctcctcttcaccaggtatcctgatgtgcagactcgagtgcaggcagaattggatcaggtcgtggggagggaccgtctgccttgtatgggtgaccagcccaacctgccctatgtcctggccttcctttatgaagccatgcgcttctccagctttgtgcctgtcactattcctcatgccaccactgccaacacctctgtcttgggctaccacattcccaaggacactgtggtttttgtcaaccagtggtctgtgaatcatgacccagtgaagtggcctaacccggagaactttgatccagctcgattcttggacaaggatggcctcatcaacaaggacctgaccagcagagtgatgattttttcagtgggcaaaaggcggtgcattggcgaagaactttctaagatgcagctttttctcttcatctccatcctggctcaccagtgcgatttcagggccaacccaaatgagcctgcgaaaatgaatttcagttatggtctaaccattaaacccaagtcatttaaagtcaatgtcactctcagagagtccatggagctccttgatagtgctgtccaaaatttacaagccaaggaaacttgccaataagaagcaagaggcaagctgaaattttagaaatattcacatcttcggagatgaggagtaaaattcagtttttttccagttcctcttttgtgctgcttctcaattagcgtttaaggtgagcataaatcaactgtccatcaggtgaggtgtgctccatacccagcggttcttcatgagtagtgggctatgcaggagcttctgggagatttttttgagtcaaagacttaaagggcccaatgaattattatatacatactgcatcttggttatttctgaaggtagcattctttggagttaaaatgcacatatagacacatacacccaaacacttacaccaaactactgaatgaagaagtattttggtaaccaggccatttttggtgggaatccaagattggtctcccatatgcagaaatagacaaaaagtatattaaacaaagtttcagagtatattgttgaagagacagagacaagtaatttcagtgtaaagtgtgtgattgaaggtgataagggaaaagataaagaccagaaattcccttttcaccttttcaggaaaataacttagactctagtatttatgggtggatttatccttttgccttctggtatacttccttacttttaaggataaatcataaagtcagttgctcaaaaagaaatcaatagttgaattagtgagtatagtggggttccatgagttatcatgaattttaaagtatgcattattaaattgtaaaactccaaggtgatgttgtacctcttttgcttgccaaagtacagaatttgaattatcagcaaagaaaaaaaaaaaagccagccaagctttaaattatgtgaccataatgtactgatttcagtaagtctcataggttaaaaaaaaaagtcaccaaatagtgtgaaatatattacttaactgtccgtaagcagtatattagtattatcttgttcaggaaaaggttgaataatatatgccttgtgtaatattgaaaattgaaaagtacaactaacgcaaccaagtgtgctaaaaatgagcttgattaaatcaaccacctatttttgacatggaaatgaagcagggtttcttttcttcactcaaattttggcgaatctcaaaattagatcctaagatgtgttcttatttttataacatctttattgaaattctatttataatacagaatcttgttttgaaaataacctaattaatatattaaaattccaaattcatggcatgcttaaattttaactaaattttaaagccattctgattattgagttccagttgaagttagtggaaatctgaacattctcctgtggaaggcagagaaatctaagctgtgtctgcccaatgaataatggaaaatgccatgaattacctggatgttctttttacgaggtgacaagagttggggacagaactcccattacaactgaccaagtttctcttctagatgattttttgaaagttaacattaatgcctgctttttggaaagtcagaatcagaagatagtcttggaagctgtttggaaaagacagtggagatgaggtcagttgtgttttttaagatggcaattactttggtagctgggaaagcataaagctcaaatgaaatgtatgcattcacatttagaaaagtgaattgaagtttcaagttttaaagttcattgcaattaaacttccaaagaaagttctacagtgtcctaagtgctaagtgcttattacattttattaagctttttggaatctttgtaccaaaattttaaaaaagggagtttttgatagttgtgtgtatgtgtgtgtggggtggggggatggtaagagaaaagagagaaacactgaaaagaaggaaagatggttaaacattttcccactcattctgaattaattaatttggagcacaaaattcaaagcatggacatttagaagaaagatgtttggcgtagcagagttaaatctcaaataggctattaaaaaagtctacaacatagcagatctgttttgtggtttggaatattaaaaaacttcatgtaattttattttaaaatttcatagctgtacttcttgaatataaaaaatcatgccagtatttttaaaggcattagagtcaactacacaaagcaggcttgcccagtacatttaaattttttggcacttgccattccaaaatattatgccccaccaaggctgagacagtgaatttgggctgctgtagcctatttttttagattgagaaatgtgtagctgcaaaaataatcatgaaccaatctggatgcctcattatgtcaaccaggtccagatgtgctataatctgtttttacgtatgtaggcccagtcgtcatcagatgcttgcggcaaaagaaagctgtgtttatatggaagaaagtaaggtgcttggagtttacctggcttatttaatatgcttataacctagttaaagaaaggaaaagaaaacaaaaaacgaatgaaaataactgaatttggaggctggagtaatcagattactgctttaatcagaaaccctcattgtgtttctaccggagagagaatgtatttgctgacaaccattaaagtcagaagttttactccaggttattgcaataaagtataatgtttattaaatgcttcatttgtatgtcaaagctttgactctataagcaaattgcttttttccaaaacaaaaagatgtctcaggtttgttttgtgaattttctaaaagctttcatgtcccagaacttagcctttacctgtgaagtgttactacagccttaatattttcctagtagatctatattagatcaaatagttgcatagcagtatatgttaatttgtgtgtttttagctgtgacacaactgtgtgattaaaaggtatactttagtagacatttataactcaaggataccttcttatttaatcttttcttatttttgtactttatcatgaatgcttttagtgtgtgcataatagctacagtgcatagttgtagacaaagtacattctggggaaacaacatttatatgtagcctttactgtttgatataccaaattaaaaaaaaattgtatctcattacttatactgggacaccattaccaaaataataaaaatcactttcataatcttgaaaaaa

SEQ ID NO: 6 - DNA, 1180 bp, Homo sapiens
ggagcggcggcccctgagaggaagcggcgaagatggccatgaacattttccggctgactggggacctgtcccacctggcggccatcgtcatcctgctgctgaagatctggaagacgcgctcctgcgccggtatttctgggaaaagccagcttctgtttgcactggtcttcacaactcgttacctggatctttttacttcatttatttcattgtataacacatctatgaaggttatctaccttgcctgctcctatgccacagtgtacctgatctacctgaaatttaaggcaacctacgatggaaatcatgataccttccgagtggagtttctggtggtccctgtgggaggcctctcatttttagttaatcacgatttctctcctcttgagatcctctggaccttctccatctacctggagtccgtggctatccttccgcagctgtttatgatcagcaagactggggaggccgagaccatcaccacccactacctgttcttcctgggcctctatcgtgctttgtatcttgtcaactggatctggcgcttctactttgagggcttctttgacctcattgctgtggtggccggcgtagtccagaccatcctatactgtgacttcttctacttgtacattacaaaagtactcaagggaaagaagctcagtttgccagcataagttgccaaagaccatcaccagcatctgtccttcagggtgctcggacagaattcttaccacagcaaaggcataagatgcttgatacggaaaatcagaaacttaactcttttgttgcagatagtcatcagtggctctgtaaaaacgcagaggaaaagagccagaaggtttctgtttaatgcatcttgccttatctttttttattactgtgtacaaagatttttttacacaaagaaacttaatgctgtattaataaattcagtgtgtagcttcaattgggatagttccaaaagtgaagattttgtgaggaataagtgcaaattttttttttattttaaaaaattctttgaaactcttaagtctttgtgtctgcaatgaaattgtactccttgacagttgatagattatgtattcttccatccctcaaacttgcattccactatatttattttttggcaaaagatgagctgtatttgtttgaaatctgagacactatgttcaattgg

SEQ ID NO: 7 - DNA, 1345 bp, Homo sapiens
aaaacagccggggctccagcgggagaacgataatgcaaagtgctatgttcttggctgttcaacacgactgcagacccatggacaagagcgcaggcagtggccacaagagcgaggagaagcgagaaaagatgaaacggacccttttaaaagattggaagacccgtttgagctacttcttacaaaattcctctactcctgggaagcccaaaaccggcaaaaaaagcaaacagcaagctttcatcaagccttctcctgaggaagcacagctgtggtcagaagcatttgacgagctgctagccagcaaatatggtcttgctgcattcagggcttttttaaagtcggaattctgtgaagaaaatattgaattctggctggcctgtgaagacttcaaaaaaaccaaatcaccccaaaagctgtcctcaaaagcaaggaaaatatatactgacttcatagaaaaggaagctccaaaagagataaacatagattttcaaaccaaaactctgattgcccagaatatacaagaagctacaagtggctgctttacaactgcccagaaaagggtatacagcttgatggagaacaactcttatcctcgtttcttggagtcagaattctaccaggacttgtgtaaaaagccacaaatcaccacagagcctcatgctacatgaaatgtaaaagggagcccagaaatggaggacatttcattctttttcctgaggggaaggactgtgacctgccataaagactgaccttgaattcagcctgggtgttcaggaaacatcactcagaactattgattcaaagttgggtagtgaatcaggaagccagtaactgactaggagaagctggtatcagaacagcttccctcactgtgtacagaacgcaagaagggaataggtggtctgaacgtggtgtctcactctgaaaagcaggaatgtaagatgatgaaagagacaatgtaatactgttggtccaaaagcatttaaaatcaatagatctgggattatgtggccttaggtagctggttgtacatctttccctaaatcgatccatgttaccacatagtagttttagtttaggattcagtaacagtgaagtgtttactatgtgcaagggtattgaagttcttatgaccacagatcatcagtactgttgtctcatgtaatgctaaaactgaaatggtccgtgtttgcattgttaaaaatgatgtgtgaaatagaatgagtgctatggtgttgaaaactgcagtgtccgttatgagtgccaaaaatctgtcttgaaggcagctacactttgaagtggtctttgaatacttttaataaatttattttgataaataatattg

SEQ ID NO: 8 - DNA, 1155 bp, Homo sapiens
atggattgcagtaacggatcggcagagtgtaccggagaaggaggatcaaaagaggtggtggggacttttaaggctaaagacctaatagtcacaccagctaccattttaaaggaaaaaccagaccccaataatctggtttttggaactgtgttcacggatcatatgctgacggtggagtggtcctcagagtttggatgggagaaacctcatatcaagcctcttcagaacctgtcattgcaccctggctcatcagctttgcactatgcagtggaattatttgaaggattgaaggcatttcgaggagtagataataaaattcgactgtttcagccaaacctcaacatggatagaatgtatcgctctgctgtgagggcaactctgccggtatttgacaaagaagagctcttagagtgtattcaacagcttgtgaaattggatcaagaatgggtcccatattcaacatctgctagtctgtatattcgtcctgcattcattggaactgagccttctcttggagtcaagaagcctaccaaagccctgctctttgtactcttgagcccagtgggaccttatttttcaagtggaacctttaatccagtgtccctgtgggccaatcccaagtatgtaagagcctggaaaggtggaactggggactgcaagatgggagggaattacggctcatctctttttgcccaatgtgaagacgtagataatgggtgtcagcaggtcctgtggctctatggcagagaccatcagatcactgaagtgggaactatgaatctttttctttactggataaatgaagatggagaagaagaactggcaactcctccactagatggcatcattcttccaggagtgacaaggcggtgcattctggacctggcacatcagtggggtgaatttaaggtgtcagagagatacctcaccatggatgacttgacaacagccctggaggggaacagagtgagagagatgtttagctctggtacagcctgtgttgtttgcccagtttctgatatactgtacaaaggcgagacaatacacattccaactatggagaatggtcctaagctggcaagccgcatcttgagcaaattaactgatatccagtatggaagagaagagagcgactggacaattgtgctatcctga

SEQ ID NO: 9 - DNA, 1824 bp, Homo sapiens
gacccagacatggagctgcgggaagaagcctggtctccggggccgctggattctgaggaccagcagatggccagtcacgagaacccagtggacatcctcatcatggatgatgacgacgtccccagctggcctcccaccaagctgtccccgccccagtctgcgcccccagccggcccgcctccccggccgcggccgcccgccccctacatctgcaacgagtgtggcaagagctttagccactggtccaagctgacgcggcaccagcgcacgcacaccggcgagcggcccaacgcctgcgccgactgcggcaagaccttctcgcagagctcgcacctggtgcagcaccggcgcatccacacgggcgagaagccctacgcctgcttggagtgcggcaagcgcttcagctggagctccaacctcatgcagcaccagcgcatccacacgggcgagaagccctacacctgccccgactgcggccgcagcttcactcagagcaagagcctggccaagcaccggcgctcgcacagcggcctcaagcccttcgtgtgcccgcgctgcggccgcggcttcagccagcccaagagcctcgcgcgtcacctgcggctgcacccggagctgtcggggcctggcgtggcggccaaggtgctggcggctagcgtccggcgggccaaggggcccgaagaggcggtggcggcggacggcgagatcgccatccccgtgggcgatggcgagggcatcatcgtggtgggcgcgccgggcgagggggccgcggccgcggcagccatggcgggcgcgggggcaaaggccgcggggccccggtcgcggcgcgccccggcccccaagccgtacgtgtgtctggagtgcgggaagggcttcgggcacggggccgggctcctggcgcaccagcgggcccagcacggggacgggctcggggcggcggggggcgaggagccggcccacatctgcgtggagtgcggggagggcttcgtgcagggcgccgcgctccggagacacaagaagatccacgcggtgggcgcgccctcggtctgcagcagctgcggacagagctactaccgcgcgggcggggaggaggaggacgacgacgacgaggccgcgggcgggcggtgccccgagtgccgcgctggggagggccggtaggggaggggcccgggggggggcgggcagggcccctcgggcttggcgggagcgacgacgtgcaagaccaagagacccagggagaagcggacggggtgcgatggaccccgcggcatccccggctccccgccctcctctgtccctgcgccgtccgtgggggggcactggggcgtattagggcccgttcacttctccgcctcgagactctgccccctcagcctggcccgcccttcctaagttatcggcctgcgagccggagagacaatggagagaactgcagaggccgagtggcgaccaggccccaagcggaaggccattttccctgctcttcctcagttgtccggggcgggggtggggggtgctgcgaggaatggagaaaccaggccctttagaggatcccagagagggaagagaaccaggggcccttttctcttttagaattttcttttaatcagcccaccttttgactccccgcccgccccaatccattatttttttctgccttccgggtcccatccttagagctcgagtcgttccttcccctcctggattccgggtaggagaggcagcgccgcaggaggcgggtgcccgtttgtcccaggcctgggcgtggtggaggaaggggtgctggaacaataaacggcactatccaaaaaaaaaaaaaaaaaa

SEQ ID NO: 10 - DNA, 2005 bp, Homo sapiens
ggcacgaggtgaagggggcttcctgaccgagacatggatttaggtgctattacaaaatactcagcattacacgccaagcccaatggactgatccttcaatacgggactgctggatttcgaacgaaggcagaacatcttgatcatgtcatgtttcgcatgggattattagctgtcctgaggtcaaaacagacaaaatccactataggagtcatggtaacagcgtcccacaatcctgaggaagacaatggtgtaaaattggttgatcctttgggtgaaatgttggcaccatcctgggaggaacatgccacctgtttagcaaatgctgaggaacaagatatgcagagagtgcttattgacatcagcgagaaagaagctgtgaatctgcaacaagatgcctttgtagttattggtagagataccaggcccagcagtgagaaactttcacaatctgtaatagatggtgtgactgttctaggaggtcaattccatgattatggcttgttaacaacaccccagctgcactacatggtgtattgtcgaaacacgggtggccgatatggaaaggcaactatagaaggttactaccagaaactctctaaggcttttgtggaactcaccaaacaggcttcttgcagtggagatgaatacagatcacttaaggttgactgtgcaaatggcataggggccctgaagctaagggaaatggaacactacttctcacagggcctgtcagttcagctgtttaatgatgggtccaagggcaaactcaatcatttatgtggagctgactttgtgaaaagtcatcagaaacctccacagggaatggaaattaagtccaatgaaagatgctgttcttttgatggagatgcagacagaattgtttattactaccatgatgcagatggccactttcatctcatagatggagacaagatagcaacgttaattagcagtttccttaaagagctcctggtggagattggagaaagtttgaatattggtgttgtacaaactgcatatgcaaatggaagttcaacacggtatcttgaagaagttatgaaggtacctgtctattgcactaagactggtgtaaaacatttgcaccacaaggctcaagagtttgacattggagtttattttgaagcaaatgggcatggcactgcactgtttagtacagctgttgaaatgaagataaaacaatcagcagaacaactggaagataagaaaagaaaagctgctaagatgcttgaaaacattattgacttgtttaaccaggcagctggtgatgctatttctgacatgctggtgattgaagcaatcttggctctgaagggcttgactgtacaacagtgggatgctctctatacagatcttccaaacagacaacttaaagttcaggttgcagacaggagagttattagcactaccgatgctgaaagacaagcagttacacccccaggattacaggaggcaatcaatgacctggtgaagaagtacaagctttctcgagcttttgtccggccctctggtacagaagatgtcgtccgagtatatgcagaagcagactcacaagaaagtgcagatcaccttgcacatgaagtgagcttggcagtatttcagctggctggaggaattggagaaaggccccaaccaggtttctgaagataattttcatattcctgagaaactggactttttacaagtctttacaaaactgtcaataataatggcagtactaagagatttataatcataatgtttacaatgcagcctactggattgtctctagatctgtttttcttaaacactaacagaataattctttataaataggtaagccttacacttgttaaagaaatttacctctaatttcagtctcactaatgtaaaatactgggacttaagtatacaattcagtcactaactgtacagttttatgtggggaacaattcatgcaggctactggaaaattaaatcttattaccaaaaaaaaaaaaaaaaaaaa

SEQ ID NO: 11 - DNA, 2932 bp, Homo sapiens
aggcccggttcgccgccgcttcctgctgccgccatgctcgacttcttcaccattttctccaagggcgggcttgtgctctggtgcttccagggcgttagcgactcatgcaccggacccgttaacgcgttgattcgttccgtgctgctgcaggaacggggaggtaacaactccttcacccatgaggcactgacactcaagtataaactggacaaccagtttgagctggtgtttgtggttggttttcagaagatcctgacactgacatatgtagacagattgatagatgacgtgcatcggctgtttcgggacaagtaccgcacagagatccaacagcaaagtgctttaagtttattaaatggcacttttgatttccaaaatgacttcctgcggctccttcgtgaagcagaggagagcagtaagatccgtgctcccactaccatgaagaaatttgaagattctgaaaaggccaagaaacctgtgaggtccatgattgagacacggggggaaaagcccaaggaaaaagcaaagaatagcaaaaaaaagggggccaagaaggaaggttctgatggtcctttggctaccagcaaaccagtccctgcagaaaagtcaggtcttccagtgggtcctgagaacgaggtagaactttccaaagaggagctgatccgcaggaagcgcgaggagttcattcagaagcatgggaggggtatggagaagtccaacaagtccacgaagtcagatgctccaaaggagaagggcaaaaaagcaccccgggtgtgggaactgggtggctgtgctaacaaagaagtgttggattacagtactcccaccaccaatggaacccctgaggctgccttgtctgaggacatcaacctgattcgagggactgggtctggggggcagcttcaggatctggactgcagcagctctgatgacgaaggggctgctcaaactctcaccaaacctagtgcgaccaagggaacactgggtggcatgtttggtatgctgaagggccttgtgggttcaaagagcttgagtcgtgaagacatggaatctgtgctggacaagatgcgtgatcatctcattgctaagaacgtggctgcagacattgccgtccagctctgtgaatctgttgccaacaagttggaagggaaggtgatggggacgttcagcacggtgacttccacagtaaagcaagccctacaggagtccctggtgcagattctgcagccacagcgtcgtgtagacatgctccgggacatcatggatgcccagcgtcgccagcgcccttatgtcgtcaccttctgcggcgttaatggagtggggaaatctactaatcttgccaagatttccttctggttgttagagaatggcttcagtgtcctcattgctgcctgtgatacatttcgtgctggggccgtggagcagctgcgtacacacacccggcgtttgagtgccctacaccctccagagaagcatggtggccgcaccatggtgcagttgtttgaaaagggctatggcaaggatgctgctggcattgccatggaagccattgcttttgcacgtaaccaaggctttgacgtggtgctggtggacacggcaggccgcatgcaagacaatgcccctctgatgactgccctggccaaactcattactgtcaatacacctgatttggtgctgtttgtaggagaagccttagtaggcaatgaagccgtggaccagctggtcaagttcaacagagccttggctgaccattctatggctcagacacctcggctcattgatggcattgttcttaccaaatttgataccattgatgacaaggtgggagctgctatttctatgacgtacatcacaagcaaacccatcgtctttgtgggcaccggccagacctactgtgacctacgcagcctcaatgccaaggctgtggtggctgccctcatgaaggcttaacgtggctcttgcccaataccaaatcgccgctttccccacaagcccttcttcctgtatcaagaatgtgctttagagtatgtgagcaacctgtcttaagtgtagtacaaaggcagagtgagggggcttgtggctccttccaaccccactccccgttcagcacagccgccatttgcaaggaaggcctaatcatgttacaatcactgcccgactgaccctctcccagcggcctcccccttcctactcaggcacccccttcactctgcctacagactcagtcttattacagctttgaccaatggttggaacccaacaccagagctttgctaataatgagtgtggtcaagagccgtctgagcctaatgagtcccagctgcattaggttaagagactcttccagagccagcgccaggtcttgaatggcacctctccctaggatacacagcctgcaggtccccaggacctgatgacacccgcctcactgtggcagtgtattgcctgttaattgctgctaattctaattctgatgatgactcctactccattgtttaccccaaagcatcagctaggctggagtgatttgttacaaatgagcaaaagatgagtccttgcttccctcagaaataaaagtagcccagctgcagcgttgcattggcttcttggcctcccaactcttccactcccagaatcagaagtaagctctgcatgttcccttcctggaggaaaccaattgtcagaaggtgtatgatgaccccctcccctcccatccttcacctcctaagcagtcctggcttttcctcatcactcccctctacagtgcctggtagacaagtgctacattgaagaacacaaacctcttgttaagacttgtcctgtagcttgatattacaggtgtgctattagtgcaataaggtgaaggctgtctgcccagagaaataagtaatttatataagaaaataaatttcataaataaattggaaattcc

SEQ ID NO: 12 - DNA, 1006 bp, Homo sapiens
gtcatttgcaaagggccatccttcccaacagagacaagcgcctgctccctgacttccttggccttcccaggatctgactcttccctttcctttcaccccagatatcgcaggcaccagtgacaagtgggaaaagctggagaaggacattctggaccacctccccgctgaggtacaggaagactacggccaggactacatcttagcacagcggaatttcctcctattgatcaactcgttagccagcaaggacttctctccggtgctgcgggacatccagcatgctatcttggcgaagagcccttttgcctattacacgccagggaaaggcgcttacttgtggatctgccttgctcactatttgcctattggcatatatgattactttgctaaaagacattttggccaagacaagcccatgcccagagctctaagaatgcctaactacaagaaaaaggccacctaggcaatggaagccctcaaagaagtcggaatgtcatagtcttgaaatgaaagggaaactgggaaactgggtttctcattaaagttgtttcccactctgtattctctgtgaaattcattgattgaatagtactttgtagtgagaaggctggagaatagcaacagcctcatggagaatgttaattgagttcctactatgcaccagatacattacaggtattctttcatctagttctcatcagagaattgaggtgggtatctttgcccctacttaatataatcagagagatttcttgtcacactctagcaaaaggcagggccagaattcaaatcctgagttggactccactgcctgccaagagaagaggaagagaaagagagagacaaggagaaagagagagggaaggaaaggaggaggcagaaatggcaagggcaacagtccaatggatcttgcaagtcttcctcactgtgcattgatattccgtgactactgcacccaaggtattggattcatggtaaatcatcagggcttcgttctcttccttcc

SEQ ID NO: 13 - DNA, 14896 bp, Homo sapiens
cagcggtgcgagctccaggcccatgcactgaggaggcggaaacaaggggagcccccagagctccatcaagccccctccaaaggctcccctacccggtccacgccccccaccccccctccccgcctcctcccaattgtgcatttttgcagccggaggcggctccgagatggggctgtgagcttcgcccggggagggggaaagagcagcgaggagtgaagcgggggggtggggtgaagggtttggatttcggggcagggggcgcacccccgtcagcaggccctccccaaggggctcggaactctacctcttcacccacgcccctggtgcgctttgccgaaggaaagaataagaacagagaaggaggagggggaaaggaggaaaagggggaccccccaactggggggggtgaaggagagaagtagcaggaccagaggggaaggggctgctgcttgcatcagcccacaccatgctgaccccgccgttgctcctgctgctgcccctgctctcagctctggtcgcggcggctatcgacgcccctaagacttgcagccccaagcagtttgcctgcagagatcaaataacctgtatctcaaagggctggcggtgcgacggtgagagggactgcccagacggatctgacgaggcccctgagatttgtccacagagtaaggcccagcgatgccagccaaacgagcataactgcctgggtactgagctgtgtgttcccatgtcccgcctctgcaatggggtccaggactgcatggacggctcagatgaggggccccactgccgagagctccaaggcaactgctctcgcctgggctgccagcaccattgtgtccccacactcgatgggcccacctgctactgcaacagcagctttcagcttcaggcagatggcaagacctgcaaagattttgatgagtgctcagtgtacggcacctgcagccagctatgcaccaacacagacggctccttcatatgtggctgtgttgaaggatacctcctgcagccggataaccgctcctgcaaggccaagaacgagccagtagaccggccccctgtgctgttgatagccaactcccagaacatcttggccacgtacctgagtggggcccaggtgtctaccatcacacctacgagcacgcggcagaccacagccatggacttcagctatgccaacgagaccgtatgctgggtgcatgttggggacagtgctgctcagacgcagctcaagtgtgcccgcatgcctggcctaaagggcttcgtggatgagcacaccatcaacatctccctcagtctgcaccacgtggaacagatggccatcgactggctgacaggcaacttctactttgtggatgacatcgatgataggatctttgtctgcaacagaaatggggacacatgtgtcacattgctagacctggaactctacaaccccaagggcattgccctggaccctgccatggggaaggtgtttttcactgactatgggcagatcccaaaggtggaacgctgtgacatggatgggcagaaccgcaccaagctcgtcgacagcaagattgtgtttcctcatggcatcacgctggacctggtcagccgccttgtctactgggcagatgcctatctggactatattgaagtggtggactatgagggcaagggccgccagaccatcatccagggcatcctgattgagcacctgtacggcctgactgtgtttgagaattatctctatgccaccaactcggacaatgccaatgcccagcagaagacgagtgtgatccgtgtgaaccgctttaacagcaccgagtaccaggttgtcacccgggtggacaagggtggtgccctccacatctaccaccagaggcgtcagccccgagtgaggagccatgcctgtgaaaacgaccagtatgggaagccgggtggctgctctgacatctgcctgctggccaacagccacaaggcgcggacctgccgctgccgttccggcttcagcctgggcagtgacgggaagtcatgcaagaagccggagcatgagctgttcctcgtgtatggcaagggccggccaggcatcatccggggcatggatatgggggccaaggtcccggatgagcacatgatccccattgaaaacctcatgaacccccgagccctggacttccacgctgagaccggcttcatctactttgccgacaccaccagctacctcattggccgccagaagattgatggcactgagcgggagaccatcctgaaggacggcatccacaatgtggagggtgtggccgtggactggatgggagacaatctgtactggacggacgatgggcccaaaaagacaatcagcgtggccaggctggagaaagctgctcagacccgcaagactttaatcgagggcaaaatgacacaccccagggctattgtggtggatccactcaatgggtggatgtactggacagactgggaggaggaccccaaggacagtcggcgtgggcggctggagagggcgtggatggatggctcacaccgagacatctttgtcacctccaagacagtgctttggcccaatgggctaagcctggacatcccggctgggcgcctctactgggtggatgccttctacgaccgcatcgagacgatactgctcaatggcacagaccggaagattgtgtatgaaggtcctgagctgaaccacgcctttggcctgtgtcaccatggcaactacctcttctggactgagtatcggagtggcagtgtctaccgcttggaacggggtgtaggaggcgcaccccccactgtgacccttctgcgcagtgagcggccccccatctttgagatccgaatgtatgatgcccagcagcagcaagttggcaccaacaaatgccgggtgaacaatggcggctgcagcagcctgtgcttggccacccctgggagccgccagtgcgcctgtgctgaggaccaggtgttggacgcagacggcgtcacttgcttggcgaacccatcctacgtgcctccaccccagtgccagccaggcgagtttgcctgtgccaacagccgctgcatccaggagcgctggaagtgtgacggagacaacgattgcctggacaacagtgatgaggccccagccctctgccatcagcacacctgcccctcggaccgattcaagtgcgagaacaaccggtgcatccccaaccgctggctctgcgacggggacaatgactgtgggaacagtgaagatgagtccaatgccacttgttcagcccgcacctgcccccccaaccagttctcctgtgccagtggccgctgcatccccatctcctggacgtgtgatctggatgacgactgtggggaccgctctgatgagtctgcttcgtgtgcctatcccacctgcttccccctgactcagtttacctgcaacaatggcagatgtatcaacatcaactggagatgcgacaatgacaatgactgtggggacaacagtgacgaagccggctgcagccactcctgttctagcacccagttcaagtgcaacagcgggcgttgcatccccgagcactggacctgcgatggggacaatgactgcggagactacagtgatgagacacacgccaactgcaccaaccaggccacgaggccccctggtggctgccacactgatgagttccagtgccggctggatggactatgcatccccctgcggtggcgctgcgatggggacactgactgcatggactccagcgatgagaagagctgtgagggagtgacccacgtctgcgatcccagtgtcaagtttggctgcaaggactcagctcggtgcatcagcaaagcgtgggtgtgtgatggcgacaatgactgtgaggataactcggacgaggagaactgcgagtccctggcctgcaggccaccctcgcacccttgtgccaacaacacctcagtctgcctgccccctgacaagctgtgtgatggcaacgacgactgtggcgacggctcagatgagggcgagctctgcgaccagtgctctctgaataacggtggctgcagccacaactgctcagtggcacctggcgaaggcattgtgtgttcctgccctctgggcatggagctggggcccgacaaccacacctgccagatccagagctactgtgccaagcatctcaaatgcagccaaaagtgcgaccagaacaagttcagcgtgaagtgctcctgctacgagggctgggtcctggaacctgacggcgagagctgccgcagcctggaccccttcaagccgttcatcattttctccaaccgccatgaaatccggcgcatcgatcttcacaaaggagactacagcgtcctggtgcccggcctgcgcaacaccatcgccctggacttccacctcagccagagcgccctctactggaccgacgtggtggaggacaagatctaccgcgggaagctgctggacaacggagccctgactagtttcgaggtggtgattcagtatggcctggccacacccgagggcctggctgtagactggattgcaggcaacatctactgggtggagagtaacctggatcagatcgaggtggccaagctggatgggaccctccggaccaccctgctggccggtgacattgagcacccaagggcaatcgcactggatccccgggatgggatcctgttttggacagactgggatgccagcctgccccgcattgaggcagcctccatgagtggggctgggcgccgcaccgtgcaccgggagaccggctctgggggctggcccaacgggctcaccgtggactacctggagaagcgcatcctttggattgacgccaggtcagatgccatttactcagcccgttacgacggctctggccacatggaggtgcttcggggacacgagttcctgtcgcacccgtttgcagtgacgctgtacgggggggaggtctactggactgactggcgaacaaacacactggctaaggccaacaagtggaccggccacaatgtcaccgtggtacagaggaccaacacccagccctttgacctgcaggtgtaccacccctcccgccagcccatggctcccaatccctgtgaggccaatgggggccagggcccctgctcccacctgtgtctcatcaactacaaccggaccgtgtcctgcgcctgcccccacctcatgaagctccacaaggacaacaccacctgctatgagtttaagaagttcctgctgtacgcacgtcagatggagatccgaggtgtggacctggatgctccctactacaactacatcatctccttcacggtgcccgacatcgacaacgtcacagtgctagactacgatgcccgcgagcagcgtgtgtactggtctgacgtgcggacacaggccatcaagcgggccttcatcaacggcacaggcgtggagacagtcgtctctgcagacttgccaaatgcccacgggctggctgtggactgggtctcccgaaacctgttctggacaagctatgacaccaataagaagcagatcaatgtggcccggctggatggctccttcaagaacgcagtggtgcagggcctggagcagccccatggccttgtcgtccaccctctgcgtgggaagctctactggaccgatggtgacaacatcagcatggccaacatggatggcagcaatcgcaccctgctcttcagtggccagaagggccccgtgggcctggctattgacttccctgaaagcaaactctactggatcagctccgggaaccataccatcaaccgctgcaacctggatgggagtgggctggaggtcatcgatgccatgcggagccagctgggcaaggccaccgccctggccatcatgggggacaagctgtggtgggctgatcaggtgtcggaaaagatgggcacatgcagcaaggctgacggctcgggctccgtggtccttcggaacagcaccaccctggtgatgcacatgaaggtctatgacgagagcatccagctggaccataagggcaccaacccctgcagtgtcaacaacggtgactgctcccagctctgcctgcccacgtcagagacgacccgctcctgcatgtgcacagccggctatagcctccggagtggccagcaggcctgcgagggcgtaggttcctttctcctgtactctgtgcatgagggaatcaggggaattcccctggatcccaatgacaagtcagatgccctggtcccagtgtccgggacctcgctggctgtcggcatcgacttccacgctgaaaatgacaccatctactgggtggacatgggcctgagcacgatcagccgggccaagcgggaccagacgtggcgtgaagacgtggtgaccaatggcattggccgtgtggagggcattgcagtggactggatcgcaggcaacatctactggacagaccagggctttgatgtcatcgaggtcgcccggctcaatggctccttccgctacgtggtgatctcccagggtctagacaagccccgggccatcaccgtccacccggagaaagggtacttgttctggactgagtggggtcagtatccgcgtattgagcggtctcggctagatggcacggagcgtgtggtgctggtcaacgtcagcatcagctggcccaacggcatctcagtggactaccaggatgggaagctgtactggtgcgatgcacggacagacaagattgaacggatcgacctggagacaggtgagaaccgcgaggtggttctgtccagcaacaacatggacatgttttcagtgtctgtgtttgaggatttcatctactggagtgacaggactcatgccaacggctctatcaagcgcgggagcaaagacaatgccacagactccgtgcccctgcgaaccggcatcggcgtccagcttaaagacatcaaagtcttcaaccgggaccggcagaaaggcaccaacgtgtgcgcggtggccaatggcgggtgccagcagctgtgcctgtaccggggccgtgggcagcgggcctgcgcctgtgcccacgggatgctggctgaagacggagcatcgtgccgcgagtatgccggctacctgctctactcagagcgcaccattctcaagagtatccacctgtcggatgagcgcaacctcaatgcgcccgtgcagcccttcgaggaccctgagcacatgaagaacgtcatcgccctggcctttgactaccgggcaggcacctctccgggcacccccaatcgcatcttcttcagcgacatccactttgggaacatccaacagatcaacgacgatggctccaggaggatcaccattgtggaaaacgtgggctccgtggaaggcctggcctatcaccgtggctgggacactctctattggacaagctacacgacatccaccatcacgcgccacacagtggaccagacccgcccaggggccttcgagcgtgagaccgtcatcactatgtctggagatgaccacccacgggccttcgttttggacgagtgccagaacctcatgttctggaccaactggaatgagcagcatcccagcatcatgcgggcggcgctctcgggagccaatgtcctgacccttatcgagaaggacatccgtacccccaatggcctggccatcgaccaccgtgccgagaagctctacttctctgacgccaccctggacaagatcgagcggtgcgagtatgacggctcccaccgctatgtgatcctaaagtcagagcctgtccaccccttcgggctggccgtgtatggggagcacattttctggactgactgggtgcggcgggcagtgcagcgggccaacaagcacgtgggcagcaacatgaagctgctgcgcgtggacatcccccagcagcccatgggcatcatcgccgtggccaacgacaccaacagctgtgaactctctccatgccgaatcaacaacggtggctgccaggacctgtgtctgctcactcaccagggccatgtcaactgctcatgccgagggggccgaatcctccaggatgacctcacctgccgagcggtgaattcctcttgccgagcacaagatgagtttgagtgtgccaatggcgagtgcatcaacttcagcctgacctgcgacggcgtcccccactgcaaggacaagtccgatgagaagccatcctactgcaactcccgccgctgcaagaagactttccggcagtgcagcaatgggcgctgtgtgtccaacatgctgtggtgcaacggggccgacgactgtggggatggctctgacgagatcccttgcaacaagacagcctgtggtgtgggcgagttccgctgccgggacgggacctgcatcgggaactccagccgctgcaaccagtttgtggattgtgaggacgcctcagatgagatgaactgcagtgccaccgactgcagcagctacttccgcctgggcgtgaagggcgtgctcttccagccctgcgagcggacctcactctgctacgcacccagctgggtgtgtgatggcgccaatgactgtggggactacagtgatgagcgcgactgcccaggtgtgaaacgccccagatgccctctgaattacttcgcctgccctagtgggcgctgcatccccatgagctggacgtgtgacaaagaggatgactgtgaacatggcgaggacgagacccactgcaacaagttctgctcagaggcccagtttgagtgccagaaccatcgctgcatctccaagcagtggctgtgtgacggcagcgatgactgtggggatggctcagacgaggctgctcactgtgaaggcaagacgtgcggcccctcctccttctcctgccctggcacccacgtgtgcgtccccgagcgctggctctgtgacggtgacaaagactgtgctgatggtgcagacgagagcatcgcagctggttgcttgtacaacagcacttgtgacgaccgtgagttcatgtgccagaaccgccagtgcatccccaagcacttcgtgtgtgaccacgaccgtgactgtgcagatggctctgatgagtcccccgagtgtgagtacccgacctgcggccccagtgagttccgctgtgccaatgggcgctgtctgagctcccgccagtgggagtgtgatggcgagaatgactgccacgaccagagtgacgaggctcccaagaacccacactgcaccagcccagagcacaagtgcaatgcctcgtcacagttcctgtgcagcagtgggcgctgtgtggctgaggcactgctctgcaacggccaggatgactgtggcgacagctcggacgagcgtggctgccacatcaatgagtgtctcagccgcaagctcagtggctgcagccaggactgtgaggacctcaagatcggcttcaagtgccgctgtcgccctggcttccggctgaaggatgacggccggacgtgtgctgatgtggacgagtgcagcaccaccttcccctgcagccagcgctgcatcaacacccatggcagctataagtgtctgtgtgtggagggctatgcaccccgcggcggcgacccccacagctgcaaggctgtgactgacgaggaaccgtttctgatcttcgccaaccggtactacctgcgcaagctcaacctggacgggtccaactacacgttacttaagcagggcctgaacaacgccgttgccttggattttgactaccgagagcagatgatctactggacagatgtgaccacccagggcagcatgatccgaaggatgcaccttaacgggagcaatgtgcaggtcctacaccgtacaggcctcagcaaccccgatgggctggctgtggactgggtgggtggcaacctgtactggtgcgacaaaggccgggacaccatcgaggtgtccaagctcaatggggcctatcggacggtgctggtcagctctggcctccgtgagcccagggctctggtggtggatgtgcagaatgggtacctgtactggacagactggggtgaccattcactgatcggccgcatcggcatggatgggtccagccgcagcgtcatcgtggacaccaagatcacatggcccaatggcctgacgctggactatgtcactgagcgcatctactgggccgacgcccgcgaggactacattgaatttgccagcctggatggctccaatcgccacgttgtgctgagccaggacatcccgcacatctttgcactgaccctgtttgaggactacgtctactggaccgactgggaaacaaagtccattaaccgagcccacaagaccacgggcaccaacaaaacgctcctcatcagcacgctgcaccggcccatggacctgcatgtcttccatgccctgcgccagccagacgtgcccaatcacccctgcaaggtcaacaatggtggctgcagcaacctgtgcctgctgtcccccgggggagggcacaaatgtgcctgccccaccaacttctacctgggcagcgatgggcgcacctgtgtgtccaactgcacggctagccagtttgtatgcaagaacgacaagtgcatccccttctggtggaagtgtgacaccgaggacgactgcggggaccactcagacgagcccccggactgccctgagttcaagtgccggcccggacagttccagtgctccacaggtatctgcacaaaccctgccttcatctgcgatggcgacaatgactgccaggacaacagtgacgaggccaactgtgacatccacgtctgcttgcccagtcagttcaaatgcaccaacaccaaccgctgtattcccggcatcttccgctgcaatgggcaggacaactgcggagatggggaggatgagagggactgccccgaggtgacctgcgcccccaaccagttccagtgctccattaccaaacggtgcatcccccgggtctgggtctgcgaccgggacaatgactgtgtggatggcagtgatgagcccgccaactgcacccagatgacctgtggtgtggacgagttccgctgcaaggattcgggccgctgcatcccagcgcgttggaagtgtgacggagaggatgactgtggggatggctcggatgagcccaaggaagagtgtgatgaacgcacctgtgagccataccagttccgctgcaagaacaaccgctgcgtgcccggccgctggcagtgcgactacgacaacgattgcggtgacaactccgatgaagagagctgcacccctcggccctgctccgagagtgagttctcctgtgccaacggccgctgcatcgcggggcgctggaaatgcgatggagaccacgactgcgcggacggctcggacgagaaagactgcaccccccgctgtgacatggaccagttccagtgcaagagcggccactgcatccccctgcgctggcgctgtgacgcagacgccgactgcatggacggcagcgacgaggaggcctgcggcactggcgtgcggacctgccccctggacgagttccagtgcaacaacaccttgtgcaagccgctggcctggaagtgcgatggcgaggatgactgtggggacaactcagatgagaaccccgaggagtgtgcccggttcgtgtgccctcccaaccggcccttccgttgcaagaatgaccgcgtctgtctgtggatcgggcgccaatgcgatggcacggacaactgtggggatgggactgatgaagaggactgtgagccccccacagcccacaccacccactgcaaagacaagaaggagtttctgtgccggaaccagcgctgcctctcctcctccctgcgctgcaacatgttcgatgactgcggggacggctctgacgaggaggactgcagcatcgaccccaagctgaccagctgcgccaccaatgccagcatctgtggggacgaggcacgctgcgtgcgcaccgagaaagcggcctactgtgcctgccgctcgggcttccacaccgtgcccggccagcccggatgccaagacatcaacgagtgcctgcgcttcggcacctgctcccagctctgcaacaacaccaagggcggccacctctgcagctgcgctcggaacttcatgaagacgcacaacacctgcaaggccgaaggctctgagtaccaggtcctgtacatcgctgatgacaatgagatccgcagcctgttccccggccacccccattcggcttacgagcaggcattccagggtgacgagagtgtccgcattgatgctatggatgtccatgtcaaggctggccgtgtctattggaccaactggcacacgggcaccatctcctaccgcagcctgccacctgctgcgcctcctaccacttccaaccgccaccggcgacagattgaccggggtgtcacccacctcaacatttcagggctgaagatgcccagaggcatcgccatcgactgggtggccggaaacgtgtactggaccgactcgggccgagatgtgattgaggtggcgcagatgaagggcgagaaccgcaagacgctcatctcgggcatgattgacgagccccacgccattgtggtggacccactgagggggaccatgtactggtcagactggggcaaccaccccaagattgagacggcagcgatggatgggacgcttcgggagacactggtgcaggacaacattcagtggcccacaggcctggccgtggattatcacaatgagcggctgtactgggcagacgccaagctttcagtcatcggcagcatccggctcaatggcacggaccccattgtggctgctgacagcaaacgaggcctaagtcaccccttcagcatcgacgtctttgaggattacatctatggtgtcacctacatcaataatcgtgtcttcaagatccataagtttggccacagccccttggtcaacctgacagggggcctgagccacgcctctgacgtggtcctttaccatcagcacaagcagcccgaagtgaccaacccatgtgaccgcaagaaatgcgagtggctctgcctgctgagccccagtgggcctgtctgcacctgtcccaatgggaagcggctggacaacggcacatgcgtgcctgtgccctctccaacgccccccccagatgctccccggcctggaacctgtaacctgcagtgcttcaacggtggcagctgtttcctcaatgcacggaggcagcccaagtgccgctgccaaccccgctacacgggtgacaagtgtgaactggaccagtgctgggagcactgtcgcaatgggggcacctgtgctgcctccccctctggcatgcccacgtgccggtgccccacgggcttcacgggccccaaatgcacccagcaggtgtgtgcgggctactgtgccaacaacagcacctgcactgtcaaccagggcaaccagccccagtgccgatgcctacccggcttcctgggcgaccgctgccagtaccggcagtgctctggctactgtgagaactttggcacatgccagatggctgctgatggctcccgacaatgccgctgcactgcctactttgagggatcgaggtgtgaggtgaacaagtgcagccgctgtctcgaaggggcctgtgtggtcaacaagcagagtggggatgtcacctgcaactgcacggatggccgggtggcccccagctgtctgacctgcgtcggccactgcagcaatggcggctcctgtaccatgaacagcaaaatgatgcctgagtgccagtgcccaccccacatgacagggccccggtgtgaggagcacgtcttcagccagcagcagccaggacatatagcctccatcctaatccctctgctgttgctgctgctgctggttctggtggccggagtggtattctggtataagcggcgagtccaaggggctaagggcttccagcaccaacggatgaccaacggggccatgaacgtggagattggaaaccccacctacaagatgtacgaaggcggagagcctgatgatgtgggaggcctactggacgctgactttgccctggaccctgacaagcccaccaacttcaccaaccccgtgtatgccacactctacatggggggccatggcagtcgccactccctggccagcacggacgagaagcgagaactcctgggccggggccctgaggacgagataggggaccccttggcatagggccctgccccgtcggactgcccccagaaagcctcctgccccctgccggtgaagtccttcagtgagcccctccccagccagcccttccctggccccgccggatgtataaatgtaaaaatgaaggaattacattttatatgtgagcgagcaagccggcaagcgagcacagtattatttctccatcccctccctgcctgctccttggcacccccatgctgccttcagggagacaggcagggagggcttggggctgcacctcctaccctcccaccagaacgcaccccactgggagagctggtggtgcagccttcccctccctgtataagacactttgccaaggctctcccctctcgccccatccctgcttgcccgctcccacagcttcctgagggctaattctgggaagggagagttctttgctgcccctgtctggaagacgtggctctgggtgaggtaggcgggaaaggatggagtgttttagttcttgggggaggccaccccaaaccccagccccaactccaggggcacctatgagatggccatgctcaacccccctcccagacaggccctccctgtctccagggcccccaccgaggttcccagggctggagacttcctctggtaaacattcctccagcctcccctcccctggggacgccaaggaggtgggccacacccaggaagggaaagcgggcagccccgttttggggacgtgaacgttttaataatttttgctgaattctttacaactaaataacacagatattcttataaataaaattgtaaaaaaaaaaa

SEQ ID NO: 14 - DNA, 3411 bp, Homo sapiens
gggcccggggtcccgccaccaccgcgcgcgggacagattgattcactttggagctgtaagtactgatgtattagggtgcagcgctcattgttcattgacgcagagtcccaaaatgaatatccaagagcagggtttccccttggacctcggagcaagtttcaccgaagatgctccccgacccccagtgcctggtgaggagggagaactggtgtccacagacccgaggcccgccagctacagtttctgctccgggaaaggtgttggcattaaaggtgagacttcgacggccactccgaggcgctcggatctggacctggggtatgagcctgagggcagtgcctcccccaccccaccatacttgaagtgggctgagtcactgcattccctgctggatgaccaagatgggataagcctgttcaggactttcctgaagcaggagggctgtgccgacttgctggacttctggtttgcctgcactggcttcaggaagctggagccctgtgactcgaacgaggagaagaggctgaagctggcgagagccatctaccgaaagtacattcttgataacaatggcatcgtgtcccggcagaccaagccagccaccaagagcttcataaagggctgcatcatgaagcagctgatcgatcctgccatgtttgaccaggcccagaccgaaatccaggccactatggaggaaaacacctatccctccttccttaagtctgatatttatttggaatatacgaggacaggctcggagagccccaaagtctgtagtgaccagagctctgggtcagggacagggaagggcatatctggatacctgccgaccttaaatgaagatgaggaatggaagtgtgaccaggacatggacgaggacgatggcagagacgctgctccccccggaagactccctcagaagctgctcctggagacagctgccccgagggtctcctccagtagacggtacagcgaaggcagagagttcaggtatggatcctggcgggagccagtcaacccctattatgtcaatgccggctatgccctggccccagccaccagtgccaacgacagcgagcagcagagcctgtccagcgatgcagacaccctgtccctcacggacagcagcgtggatgggatccccccatacaggatccgtaagcagcaccgcagggagatgcaggagagcgcgcaggtcaatgggcgggtgcccctacctcacattccccgcacgtaccgggtgccgaaggaggtccgcgtggagcctcagaagttcgcggaggagctcatccaccgcctggaggctgtgcagcgcacgcgggaggccgaggagaagctggaggagcggctgaagcgcgtgcgcatggaggaggaaggtgaggacggcgatccatcgtcagggcccccagggccgtgtcacaagctgcctcccgcccccgcttggcaccacttcccgccccgcttgtgttggacatgggcttgtgccgggctccgggatgcacacgaggagaaccctgagagcatcctggacgagcacgtacagcgtgtgctgaggacaactggccgccagtcgcctgggcctggccatcgctccccggacagtgggcacgtggccaagatgccagtggcactggggggtgccgcctcggggcacgggaagcacgtacccaagtcaggggcgaagctggacgcggccggcctgcaccaccaccgacacgtccaccaccacgtccaccacagcacagcccggcccaaggagcaggtggaggccgaggccacccgcagggcccagagcagcttcgcctggggcctggaaccacacagccatggggcaaggtcccgaggctactcagagagtgttggcgctgcccccaacgccagtgatggcctcgcccacagtgggaaggtgggcgttgcgtgcaaaagaaatgccaagaaggctgagtcggggaagagcgccagcaccgaggtgccaggtgcctcggaggatgcggagaagaaccagaaaatcatgcagtggatcattgagggggaaaaggagatcagcaggcaccgcaggaccggccacgggtcttcggggacgaggaagccacagccccatgagaactccagaccyttgtcccttgagcacccctgggccggccctcagctccggacctccgtgcagccctcccacctcttcatccaagaccccaccatgccaccccacccagctcccaaccccctaacccagctggaggaggcgcgccgacgtctggaggaggaagaaaagagagccagccgagcaccctccaagcagaggtatgtgcaggaggttatgcggcggggacgcgcctgcgtcaggccagcgtgcgcgccggtgctgcacgtggtaccagccgtgtcggacatggagctctccgagacagagacaagatcgcagaggaaggtgggcggcgggagtgcccagccgtgtgacagcatcgttgtggcgtactacttctgcggggaacccatcccctaccgcaccctggtgaggggccgcgctgtcaccctgggccagttcaaggagctgctgaccaaaaagggcagctacagatactacttcaagaaagtgagcgacgagtttgactgtggggtggtgtttgaggaggttcgagaggacgaggccgtcctgcccgtctttgaggagaagatcatcggcaaagtggagaaggtggactgataggctggtgggctggccgctgtgccaggcgaggcccttggcgggcacgggtgtcacggccaggcagatgacctcgtactcaggagcccgatggggaacagtgttgggtgtaccacccatccctgtggtctacccgtgtctagaggcaggtagggggtccctccaagtggtccacaagcttctgtcctgcccccaaggaggcagcctggaccactcctcatagcaatacttggagggcccagcccaagtgaggcagccgaggtccctgctgccagcttcaggtgacccccccccatcccccggcacctcccttgggcacgtgtgctgggatctactttccctctgggatttgcccacgtacccaggtctggctggggcccaggcccggatgcagaggcctgcagggcctctgtcaattgtacgcgccaccaagtgccttcaacacagcttgtctcttgcctgccactgtgtgaatcggcgacggagcactgcacctgcctccagccgccggctgtgcagtcctgggtcctcctttctgagggcccgtgtaaatatgtacatttctcaggctagggccagcaggggctgcccgagtctgtttttcatgcgatgacacttgtacaattatcttttcaaaggtacttggataataatgaaataaaactgtttttgaacctgaataaaaaaaaaaaaaaaaaaaaaaaaaa

SEQ ID NO: 15 - DNA, 3233 bp, Homo sapiens
cttgaagtggtttgttgtgcttgaagagaccccatggatgccaccagtcacattgacaacatggaaaacgaacggattccctttgatttaatggataccgtccctgcagaggcactatacgaggcccacttagagaagctgaggaacgaaaggaaaagagttgagatgcgaagggcgtttaaagaaaacctggagacttctcctttcataactcccggaaagccttgggaagaggcccgtagttttattatgaatgaggatttctaccagtggctggaggaatctgtatacacggatatttatggcaaacaccaaaagcaaattatagataaagcaaaggaagaatttcaggagttgcttttggaatattcagaattgttttatgaactggagctggatgctaagcccagcaaggagaagatgggtgttattcaggatgttctgggagaggaacagcgatttaaagccatttacaaaagctccaagcagagcgttgatgcccttattctgaaacacattcattttgtgtaccacccaacaaaggagacatgccccagctgcccagcttgtgtggacgctaagattgagcacttgattagttctcggtttatccggccgtctgaccggaatcagaaaaattcactctctgaccctaacattgatagaatcaacttggttatattgggcaaagacgccttgcccgagagttggccaatggagattagagctctttgtacaaatgatgacaagtatgtgatagatggtaaaatgtatgagctttccctgaggccaatagaggggaatgtcaggcttcctgtgaactctttccagacgccaacatttcagccccacggctgtctctgcctttacaattcaaaggaatcgctatcctatgtagtggaaagtatagagaagagtagagagtccacgctgggccggcgggataatcatttagtccatctcccccttacattaattttggttaacaagagaggagacaccagtggagagactctgcatagcttaatacagcaaggtcaacaaattgctagcaaacttcagtgtgtctttctcgaccctgcttctgctggcattggttacggacgcaacattaatgaaaagcaaatcagtcaagttttgaagggactcctggactctaagcgtaacttaaacctggtcagttctactgctagcatcaaagatttggctgatgttgatctgcgaattgttatgtgtctgatgtgtggagatccttttagtgcagatgatatactttttcctgtccttcagtcccaaacctgtaaatcttcccattgtggaagcaacaactctgttttacttgaactaccaatcggactgcacaagaagcggattgaactgtctgttctttcataccattcctcctttagcatcagaaagagccggttggttcatgggtacattgttttttattcagccaaacgtaaggcctctttggctatgttacgtgcctttctttgtgaagtgcaggatattatccctattcagcttgtagcactcactgatggcgctgtagatgtcctggacaatgacttaagtagggaacagctaactgagggggaggagattgctcaagaaattgacggaaggttcacaagcatcccctgtagccaaccccagcataaacttgagatctttcacccattttttaaagatgtggtggaaaaaaagaacataatcgaggctactcatatgtacgataatgctgccgaggcctgtagcaccaccgaagaggtgtttaactccccccgggcaggatcaccgctctgcaactcaaacctgcaggattcagaagaagatatcgagccatcttacagcctgtttcgagaagacacatcactgccttctctgtccaaagaccattctaagctctctatggaactggagggaaatgatgggctgtctttcattatgagcaattttgagagtaaactgaacaacaaagtacctccgccagtcaaaccaaagcctcctgtccattttgaaattacaaagggggatctatcttatttagaccaaggccatagggatggacagaggaagtctgtgtcttctagcccctggctgcctcaggatgggtttgatccttctgactatgctgaacccatggatgctgtggtgaagccaaggaatgaagaagaaaacatatactccgtgccccatgacagcacccaaggcaaaatcatcaccattcggaatatcaacaaagcccagtccaacggcagcgggaatggttctgacagtgaaatggacaccagctctctagagcgagggcgcaaggtttccatcgtgagcaagccagtgctgtacaggacgagatgcacccggctgggcggtttgctagttaccggaccagcttcagcgtggggagtgatgatgagctggggcccatccggaagaaagaggaggatcaggcatcccagggttataaaggggacaatgctgtcattccatacgaaacagacgaagacccgcggaggaggaatattcttcgcagcctaaggaggaacactaagaaaccaaagcccaaaccccggccatccatcacaaaggccaacctgggagagtaactattttggggtgcccttaacaactgtcgtgactccagagaagccgatccccatttttattgaaagatgtattgagtacattgaagccacaggactgagcacggaaggcatctaccgggtcagcgggaacaagtctgagatggagagtctgcagagacagtttgatcaagaccacaacctggacctggcagagaaagactttacggtgaataccgtggctggtgccatgaagagctttttctcagaactgcctgaccccctggtccgtataacatgcagatcgacttggtggaagcacacaaaatcaacgaccgggagcagaagttgcatgcccttaaggaggtattaaagaaatttccaaaggaaaaccacgaagtcttcaagtatgtcatctctcacctaaacaaggtcagccacaacaacaaggtgaatctcatgaccagcgagaacctctccatctgcttctggcccaccttgatgagacctgatttcagcactatggacgccctcacagccacgcgcacctaccagacaatcattgaactctttatccagcagtgccccttcttcttctacaatcggcccatcaccgagcccccggcgccaggcccagctcccggaatt

SEQ ID NO: 16 - DNA, 2667 bp, Homo sapiens
tctgagaggcgaggccgggtgaggcggcgagggcggcccgacgggcgcgggacgggacggggcagcgagggcgccgggagccgcggcccggaatcggggcgcttcgccccgggccccccagcatgaagaccccggcggacacagggtttgccttcccggattgggcctacaagccagagtcgtcccctggctcaaggcagatccagctgtggcactttatcctggagctgctgcggaaggaggagtaccagggcgtcattgcctggcagggggactacggggaattcgtcatcaaagaccctgatgaggtggcccggctgtggggcgttcgcaagtgcaagccccagatgaattacgacaagctgagccgggccctgcgctattactataacaagcgcattctgcacaagaccaaggggaaacggttcacctacaagttcaatttcaacaaactggtgctggtcaattacccattcattgatgtggggttggctgggggtgcagtgccccagagtgccccgccagtgccgtcgggtggtagccacttccgcttccctccctcaacgccctccgaggtgctgtcccccaccgaggacccccgctcaccaccagcctgctcttcatcttcatcttccctcttctcggctgtggtggcccgccgcctgggccgaggctcagtcagtgactgtagtgatggcacgtcagagctggaggaaccgctgggagaggatccccgcgcccgaccacccggccctccggatctgggtgccttccgagggcccccgctggcccgcctgccccatgaccctggtgtcttccgagtctatccccggcctcggggtggccctgaacccctcagccccttccctgtgtcgcctctggccggtcctggatccctgctgccccctcagctctccccggctctgcccatgacgcccacccacctggcctacactccctcgcccacgctgagcccgatgtaccccagtggtggcggggggcccagcggctcagggggaggctcccacttctccttcagccctgaggacatgaaacggtacctgcaggcccacacccaaagcgtctacaactaccacctcagcccccgcgccttcctgcactaccctgggctggtggtgccccagccccagcgccctgacaagtgcccgctgccgcccatggcacccgagaccccaccggtcccctcctcggcctcgtcatcctcttcttcttcttcctccccattcaagtttaagctccagcggcccccactcggacgccggcagcgggcagctggggagaaggccgtagccgctgctgacaagagcggtggcagtgcaggcgggctggctgagggggcaggggcgctagccccaccgcccccgccaccacagatcaaggtggagcccatctcggaaggcgagtcggaggaggtagaggtgactgacatcagtgatgaggatgaggaagacggggaggtgttcaagacgccccgtgccccacctgcaccccctaagcctgagcccggcgaggcacccggggcatcccagtgcatgcccctcaagctacgctttaagcggcgctggagtgaagactgtcgcctcgaagggggtgggggccccgctgggggctttgaggatgagggtgaggacaagaaggtgcgtggggaggggcctggggaggctggggggcccctcaccccaaggcgggtgagctctgacctccagcatgccacggcccagctctccctggagcaccgagactcctgagggctgtgggcaggggacctgtgtgccccgcaccccccatgcttcttttgctgccttaagccccctatgccctggaggtgagggcagctctcttgtctcttccctgcctcctcccttttccctccccacattttgtataaaactttaatttcttttttttaaaaatggtgggggtgggtgggtgcccagggctaggggctattccctgtctctgtgggtttctaagctctgggcaaattggtggtagggggagggagggggaagttaagggggtcacctccattctggggaatttatatttgaattgaggctttggccttaacacccaggaacttttctattacaatcgcttaggaagtaaagccttgtctccctccctgttctctgcctcttgtacccctctgacccacccgctctgccccactcccagccctcctcagccccagccctgcctgccctgcccctccagggggccatgagtgcctaggtttctcataccccacaaggtcacagcaggggagggagggacaattttataatgaaccaaaaattccatgtgttggggggtggggggcggaggagggtgaggggtgccgcccatgggccacaaatctctacaagtgcctgctatccctctcccactccccaccccagcaccggtccaaccccttcatccccagctgctcctaggactggcccatgggcaggcgggtggggggatgggaagggggtgccctgaaaccaaactggaagccccctctgcctcccagctggggcctctggggtggggtggggggctgtggtcaagccttattctgtattggggactgagggtggggggagtagaggggccgctggagaatgtattcaaaacaataaactttggacctttggaaaa

SEQ ID NO: 17 - DNA, 6754 bp, Homo sapiens
ccgggctgcgcggcgaggctgagccgggcccgggcgccggggccgggggcggctggcgcgggcaggaagcgcctcgcggacccgggcccgccccccgcctcccgccgcctccgggctcccggctcccggccgcgcctcgccccatgcactcgccgcgccgcgcagcccgcgcacgcccggatggctcctcgcgccgcgggcggcgcaccccttagcgcccgggccgccgccgccagccccccgccgttccagacgccgccgcggtgcccggtgccgctgctgttgctgctgctcctgggggcggcgcgggccggcgccctggagatccagcgtcggttcccctcgcccacgcccaccaacaacttcgccctggacggcgcggcggggaccgtgtacctggcggccgtcaaccgcctctatcagctgtcgggcgccaacctgagcctggaggccgaggcggccgtgggcccggtgcccgacagcccgctgtgtcacgctccgcagctgccgcaggcctcgtgcgagcacccgcggcgcctcacggacaactacaacaagatcctgcagctggaccccggccagggcctggtagtcgtgtgcgggtccatctaccagggcttctgccagctgcggcgccggggtaacatctcggccgtggccgtgcgcttcccgcccgccgcgccgcccgccgagcccgtcacggtgttccccagcatgctgaacgtggcggccaaccacccgaacgcgtccaccgtggggctagttctgcctcccgccgcgggcgcggggggcagccgcctgctcgtgggcgccacgtacaccggttacggcagctccttcttcccgcgcaaccgcagcctggaggaccaccgcttcgagaacacgcccgagatcgccatccgctccctggacacgcgcggcgacctggccaagctcttcaccttcgacctcaacccctccgacgacaacatcctcaagatcaagcagggcgccaaggagcagcacaagctgggcttcgtgagcgccttcctgcacccgtccgacccgccgccgggtgcacagtcctacgcgtacctggcgctcaacagcgaggcgcgcgcgggcgacaaggagagccaggcgcggagcctgctggcgcgcatctgcctgccccacggcgccggcggcgacgccaagaagctcaccgagtcctacatccagttgggcttgcagtgcgcgggcggcgcgggccgcggcgacctctacagccgcctggtgtcggtcttcccagcccgggagcggctctttgctgtcttcgagcggccccaggggtcccccgcggcccgcgctgctccggccgcactctgcgccttccgcttcgccgacgtgcgagccgccatccgagctgcgcgcaccgcctgcttcgtggaaccggcgcccgacgtggtggcggtgctcgacagcgtggtgcagggcacgggaccggcctgcgagcgcaagctcaacatccagctccagccagagcagctggactgtggagctgctcacctgcagcacccgctgtccatcctgcagcccctgaaggccacgcccgtgttccgcgccccgggcctcacctccgtggccgtggccagcgtcaacaactacacagcggtcttcctgggcacggtcaacgggaggcttctcaagatcaacctgaacgagagcatgcaggtggtgagcaggcgggtggtgactgtggcctatggggagcccgtgcaccatgtcatgcagtttgacccagcagactccgtttacctttacctgatgacgtcccaccagatggccagggtgaaggtcgccgcctgcaacgtgcactccacctgtggggactgcgtgggtgcggcggacgcctactgcggctggtgtgccctggagacgcggtgcaccttgcagcaggactgcaccaattccagccagcagcatttctggaccagtgccagcgagggccccagccgctgtcctgccatgaccgtcctgccttccgagatcgatgtgcgccaggagtacccaggcatgatcctgcagatctcgggcagcctgcccagcctcagtggcatggagatggcctgtgactatgggaacaacatccgcactgtggctcgggtcccaggccctgcctttggtcaccagattgcctactgcaacctcctgccgagggaccagtttccgcccttcccccccaaccaggaccacgtgactgttgagatgtctgtgagggtcaatgggcggaacatcgtcaaggccaatttcaccatctacgactgcagccgcactgcacaagtgtacccccacacagcctgtaccagctgcctgtcggcacagtggccctgtttctggtgcagccagcagcactcctgtgtttccaaccagtctcggtgcgaggcctcaccaaaccccacgagccctcaggactgcccccggaccctgctctcacccctggcacccgtgcctacgggtggctcccagaacatcctggtgcctctggccaacactgcctttttccagggtgcagccctggagtgtagttttgggctggaggagatcttcgaggctgtgtgggtgaatgagtctgttgtacgctgtgaccaggtggtgctgcacacgacccggaagagccaggtgttcccgctcagcctccaactaaaggggcggccagcccgattcctggacagccctgagcccatgacagtcatggtctataactgtgccatgggcagccccgactgttcccagtgcctgggccgcgaagacctgggtcacctgtgcatgtggagtgatggctgccgcctgcgggggcctctgcagcccatggctggcacctgccccgcccccgagatccgcgcgattgagcccctgagtggcccgttggacggtgggaccctgctgaccatccgaggaaggaacctgggccggcggctcagtgacgtggcccacggcgtgtggattggtggtgtggcctgtgagccactgcctgacagatacacggtgtcggaggagatcgtgtgtgtcacagggccagccccaggaccactctcaggtgtggtgaccgtgaacgcctctaaggagggcaagtcccgggaccgcttctcctacgtgctgcccctggtccactccctggagcctaccatgggccccaaggccgggggcaccaggatcaccatccatgggaatgacctccatgtaggctccgagctccaggtcctggtgaacgacacagacccctgcacggagctgatgcgcacagataccagcatcgcctgcaccatgcctgagggggccctgccggctccggtgcctgtgtgtgtgcgcttcgagcgtcggggctgcgtgcacggcaacctcaccttctggtacatgcagaacccggtcatcacggccatcagtccccgccgcagccctgtcagtggcggcaggaccatcacagtggctggtgagcgtttccacatggtgcagaatgtgtccatggccgtccaccacattggccgggagcccacgctctgcaaggttctcaactccaccctcatcacctgcccgtcccccggggccctgagcaacgcatcagcgccagtggacttcttcatcaatgggcgggcctacgcagacgaggtggctgtggctgaggagctactggaccccgaggaggcacagcggggcagcaggttccgcctggactacctccccaacccacagttctctacggccaagagggagaagtggatcaagcaccaccccggggagcctctcaccctcgttatccacaaggagcaggacagcctggggctccagagtcacgagtaccgggtcaagataggccaagtaagctgcgacatccagattgtctctgacagaatcatccactgctcggtcaacgagtccctgggcgcggccgtggggcagctgcccatcacaatccaggtagggaacttcaaccagaccatcgccacactgcagctggggggtagcgagacggccatcatcgtgtccatcgtcatctgcagcgtcctgctgctgctctccgtggtggccctgttcgtcttctgtaccaagagccgacgtgctgagcgttactggcagaagacgctgctgcagatggaggagatggaatctcagatccgagaggaaatccgcaaaggcttcgctgagctgcagacagacatgacagatctcaccaaggagctgaaccgcagccagggcatccccttcctggagtataagcacttcgtgacccgcaccttcttccccaagtgttcctccctttatgaagagcgttacgtgctgccctcccagaccctcaactcccagggcagctcccaggcacaggaaacccacccactgctgggagagtggaagattcctgagagctgccggcccaacatggaagagggaattagcttgttctcctcactactcaacaacaagcacttcctcatcgtctttgtccacgcgctggagcagcagaaggactttgcggtgcgcgacaggtgcagcctggcctcgctgctgaccatcgcgctgcacggcaagctggagtactacaccagcatcatgaaggagctgctggtggacctcattgacgcctcggccgccaagaaccccaagctcatgctgcggcgcacagagtctgtggtggagaagatgctcaccaactggatgtccatctgcatgtacagctgtctgcgggagacggtgggggagccattcttcctgctgctgtgtgccatcaagcagcaaatcaacaagggctccatcgacgccatcacaggcaaggcccgctacacactcaatgaggagtggctgctgcgggagaacatcgaggccaagccccggaacctgaacgtgtccttccagggctgtggcatggactcgctgagcgtgcgggccatggacaccgacacgctgacacaggtcaaggagaagatcctggaggccttctgcaagaatgtgccctactcccagtggccgcgtgcagaggacgtcgaccttgagtggttcgcctccagcacacagagctacatccttcgggacctggacgacacctcagtggtggaagacggccgcaagaagcttaacacgctggcccattacaagatccctgaaggtgcctccctggccatgagtctcatagacaagaaggacaacacactgggccgagtgaaagacttggacacagagaagtatttccatttggtgctgcctacggacgagctggcggagcccaagaagtctcaccggcagagccatcgcaagaaggtgctcccggaaatctacctgacccgcctgctctccaccaagggcacgttgcagaagtttctggatgacctgttcaaggccattctgagtatccgtgaagacaagcccccactggctgtcaagtactttttcgacttcctggaggagcaggctgagaagaggggaatctccgaccccgacaccctacacatctggaagaccaacagccttcctctccggttctgggtgaacatcctgaagaacccccagtttgtctttgacatcgacaagacagaccacatcgacgcctgcctttcagtcatcgcgcaggccttcatcgacgcctgctccatctctgacctgcagctgggcaaggattcgccaaccaacaagctcctctacgccaaggagattcctgagtaccggaagatcgtgcagcgctactacaagcagatccaggacatgacgccgctcagcgagcaagagatgaatgcccatctggccgaggagtcgaggaaataccagaatgagttcaacaccaatgtggccatggcagagatttataagtacgccaagaggtatcggccgcagatcatggccgcgctggaggccaaccccacggcccggaggacacaactgcagcacaagtttgagcaggtggtggctttgatggaggacaacatctacgagtgctacagtgaggcctgagacacatggagagttggtcaggctgctgctgggagaaatggacgcccactgggcctcaacttgatcttctaccccgtgcctgtgactcagactgggaaatactgagcagagacggctggggcgggggcaggaggaggggctgctctctgagacaggggcgcccccgccttgacccctgggcacctccatcccctcccacctgtccccagatcagtctctgggatggaggccagagagctggtcaggctcccccatctgcccagcacggcctgcactgtgcccacccacttgctccacaacgtccagttggtcctgctgccaagagccccgtgcatccaggcggccaagcacaaactgggggagaggaggccgccagcccggaggctgcagcccagaaactctacctcatccacactggtgcagggagccctccttgaactgacctttgattggtttctgcttcaactaccaaaatgttatctccacttccccctcacccgtagaggatcctggccacagacagtttcaagtagtgtcagatttttgttgcttgggcggctgttggtagagtgggcagtgcccgcgccatggggtgctctgtgggcttctccaggagcagggagggtggaggggagggatggggggcacaggagctgggagccccgtctccaggaaaaggagaggggttaagatgcaccgaggctgtagctgggctacttgatcttgctgaaagtgtttctaaagatagcaccacttttttttttaaagcttttatatattaaaaaacgtatcatgc

SEQ ID NO: 18 - DNA, 3625 bp, Homo sapiens
ggccaccggagcggcccggcgacgatcgctgacagcttcccctgcccttcccgtcggtcgggccgccagccgccgcagccctcggcctgcacgcagccaccggccccgctcccggagcccagcgccgccgaggccgcagccgcccggccagtaaggcggcgccgcccgcggccaccgcgggccctgccgttccctccgccgcgctgcgccatggcgcggcgctgactggcctggcccggccccgccgcgctcccgctcgccccgacccgcactcgggcccgcccgggctccggcctgccgccgcctcttccttctccagccggcaggccccgccgcttaggagggagagcccacccgcgccaggaggccgaacgcggactcgccacccggcttcagaatggcagaagatgatccatatttgggaaggcctgaacaaatgtttcatttggatccttctttgactcatacaatatttaatccagaagtatttcaaccacagatggcactgccaacagatggcccataccttcaaatattagagcaacctaaacagagaggatttcgtttccgttatgtatgtgaaggcccatcccatggtggactacctggtgcctctagtgaaaagaacaagaagtcttaccctcaggtcaaaatctgcaactatgtgggaccagcaaaggttattgttcagttggtcacaaatggaaaaaatatccacctgcatgcccacagcctggtgggaaaacactgtgaggatgggatctgcactgtaactgctggacccaaggacatggtggtcggcttcgcaaacctgggtatacttcatgtgacaaagaaaaaagtatttgaaacactggaagcacgaatgacagaggcgtgtataaggggctataatcctggactcttggtgcaccctgaccttgcctatttgcaagcagaaggtggaggggaccggcagctgggagatcgggaaaaagagctaatccgccaagcagctctgcagcagaccaaggagatggacctcagcgtggtgcggctcatgtttacagcttttcttccggatagcactggcagcttcacaaggcgcctggaacccgtggtatcagacgccatctatgacagtaaagcccccaatgcatccaacttgaaaattgtaagaatggacaggacagctggatgtgtgactggaggggaggaaatttatcttctttgtgacaaagttcagaaagatgacatccagattcgattttatgaagaggaagaaaatggtggagtctgggaaggatttggagatttttcccccacagatgttcatagacaatttgccattgtcttcaaaactccaaagtataaagatattaatattacaaaaccagcctctgtgtttgtccagcttcggaggaaatctgacttggaaactagtgaaccaaaacctttcctctactatcctgaaatcaaagataaagaagaagtgcagaggaaacgtcagaagctcatgcccaatttttcggatagtttcggcggtggtagtggtgccggagctggaggcggaggcatgtttggtagtggcggtggaggagggggcactggaagtacaggtccagggtatagcttcccacactatggatttcctacttatggtgggattactttccatcctggaactactaaatctaatgctgggatgaagcatggaaccatggacactgaatctaaaaaggaccctgaaggttgtgacaaaagtgatgacaaaaacactgtaaacctctttgggaaagttattgaaaccacagagcaagatcaggagcccagcgaggccaccgttgggaatggtgaggtcactctaacgtatgcaacaggaacaaaagaagagagtgctggagttcaggataacctctttctagagaaggctatgcagcttgcaaagaggcatgccaatgcccttttcgactacgcggtgacaggagacgtgaagatgctgctggccgtccagcgccatctcactgctgtgcaggatgagaatggggacagtgtcttacacttagcaatcatccaccttcattctcaacttgtgagggatctactagaagtcacatctggtttgatttctgatgacattatcaacatgagaaatgatctgtaccagacgcccttgcacttggcagtgatcactaagcaggaagatgtggtggaggatttgctgagggctggggccgacctgagccttctggaccgcttgggtaactctgttttgcacctagctgccaaagaaggacatgataaagttctcagtatcttactcaagcacaaaaaggcagcactacttcttgaccaccccaacggggacggtctgaatgccattcatctagccatgatgagcaatagcctgccatgtttgctgctgctggtggccgctggggctgacgtcaatgctcaggagcagaagtccgggcgcacagcactgcacctggctgtggagcacgacaacatctcattggcaggctgcctgctcctggagggtgatgcccatgtggacagtactacctacgatggaaccacacccctgcatatagcagctgggagagggtccaccaggctggcagctcttctcaaagcagcaggagcagatcccctggtggagaactttgagcctctctatgacctggatgactcttgggaaaatgcaggagaggatgaaggagttgtgcctggaaccacgcctctagatatggccaccagctggcaggtatttgacatattaaatgggaaaccatatgagccagagtttacatctgatgatttactagcacaaggagacatgaaacagctggctgaagatgtgaagctgcagctgtataagttactagaaattcctgatccagacaaaaactgggctactctggcgcagaaattaggtctggggatacttaataatgccttccggctgagtcctgctccttccaaaacacttatggacaactatgaggtctctgggggtacagtcagagagctggtggaggccctgagacaaatgggctacaccgaagcaattgaagtgatccaggcagcctccagcccagtgaagaccacctctcaggcccactcgctgcctctctcgcctgcctccacaaggcagcaaatagacgagctccgagacagtgacagtgtctgcgacacgggcgtggagacatccttccgcaaactcagctttaccgagtctctgaccagtggtgcctcactgctaactctcaacaaaatgccccatgattatgggcaggaaggacctctagaaggcaaaatttagcctgctgacaatttcccacaccgtgtaaaccaaagccctaaaattccactgcgttgtccacaagacagaagctgaagtgcatccaaaggtgctcagagagccggcccgcctgaatcattctcgatttaactcgagaccttttcaacttggcttcctttcttggttcataaatgaattttagtttggttcacttacagatagtatctagcaatcacaacactggctgagcggatgcatctggggatgaggttgcttactaagctttgccagctgctgctggatcacagctgctttctgttgtcattgctgttgtccctctgc

SEQ ID NO: 19 - DNA, 5910 bp, Homo sapiens
cggaggacagccggaccgagccaacgccggggactttgttccctccacggaggggactcggcaactcgcagcggcagggtctggggccggcgcctgggagggatctgcgccccccactcactccctagctgtgttcccgccgccgccccggctagtctccggcgctggcgcctatggtcggcctccgacagcgctccggagggaccgggggagctcccaggcgcccgggactggagactgatgcatgaggggcctacggaggcgcaggagcggtggtgatggtctgggaagcggagctgaagtcccctgggctttggtgaggcgtgacagtttatcatgaccgtgttcaggcaggaaaacgtggatgattactacgacaccggcgaggaacttggcagtggacagtttgcggttgtgaagaaatgccgtgagaaaagtaccggcctccagtatgccgccaaattcatcaagaaaaggaggactaagtccagccggcggggtgtgagccgcgaggacatcgagcgggaggtcagcatcctgaaggagatccagcaccccaatgtcatcaccctgcacgaggtctatgagaacaagacggacgtcatcctgatcttggaactcgttgcaggtggcgagctgtttgacttcttagctgaaaaggaatctttaactgaagaggaagcaactgaatttctcaaacaaattcttaatggtgtttactacctgcactcccttcaaatcgcccactttgatcttaagcctgagaacataatgcttttggatagaaatgtccccaaacctcggatcaagatcattgactttgggttggcccataaaattgactttggaaatgaatttaaaaacatatttgggactccagagtttgtcgctcctgagatagtcaactatgaacctcttggtcttgaggcagatatgtggagtatcggggtaataacctatatcctcctaagtggggcctccccatttcttggagacactaagcaagaaacgttagcaaatgtatccgctgtcaactacgaatttgaggatgaatacttcagtaataccagtgccctagccaaagatttcataagaagacttctggtcaaggatccaaagaagagaatgacaattcaagatagtttgcagcatccctggatcaagcctaaagatacacaacaggcacttagtagaaaagcatcagcagtaaacatggagaaattcaagaagtttgcagcccggaaaaaatggaaacaatccgttcgcttgatatcactgtgccaaagattatccaggtcattcctgtccagaagtaacatgagtgttgccagaagcgatgatactctggatgaggaagactcctttgtgatgaaagccatcatccatgccatcaacgatgacaatgtcccaggcctgcagcaccttctgggctcattatccaactatgatgttaaccaacccaacaagcacgggacacctccattactcattgctgctggctgtgggaatattcaaatactacagttgctcattaaaagaggctcgagaatcgatgtccaggataagggcgggtccaatgccgtctactgggctgctcggcatggccacgtcgataccttgaaatttctcagtgagaacaaatgccctttggatgtgaaagacaagtctggagagatggccctccacgtggcagctcgctatggccatgctgacgtggctcaagttacttgtgcagcttcggctcaaatcccaatatccaggacaaaggaagaagaaacccccctgcactgtgctgcttggcacggctattactctgtggccaaagccctttgtgaagccggctgtaacgtgaacatcaagaaccgagaaggagagacgcccctcctgacagcctctgccaggggctaccacgacatcgtggagtgtctggccgaacatggagccgaccttaatgcttgcgacaaggacggacacattgcccttcatctggctgtaagacggtgtcagatggaggtaatcaagactctcctcagccaagggtgtttcgtcgattatcaagacaggcacggcaatactcccctccatgtggcatgtaaagatggcaacatgcctatcgtggtggccctctgtgaagcaaactgcaatttggacatctccaacaagtatgggcgaacgcctctgcaccttgcggccaacaacggaatcctagacgtggtccggtatctctgtctgatgggagccagcgttgaggcgctgaccacggacggaaagacggcagaagatcttgctagatcggaacagcacgagcacgtagcaggtctccttgcaagacttcgaaaggatacgcaccgaggactcttcatccagcagctccgacccacacagaacctgcagccaagaattaagctcaagctgtttggccactcgggatccgggaaaaccacccttgtagaatctctcaagtgtgggctgctgaggagctttttcagaaggcgtcggcccagactgtcttccaccaactccagcaggttcccaccttcacccctggcttctaagcccacagtctcagtgagcatcaacaacctgtacccaggctgcgagaacgtgagtgtgaggagccgcagcatgatgttcgagccgggtcttaccaaagggatgctggaggtgtttgtggccccgacccaccacccgcactgctcggccgatgaccagtccaccaaggccatcgacatccagaacgcttatttgaatggagttggcgatttcagcgtgtgggagttctctggaaatcctgtgtatttctgctgttatgactattttgctgcaaatgatcccacgtcaatccatgttgttgtctttagtctagaagagccctatgagatccagctgaacccagtgattttctggctcagtttcctgaagtcccttgtcccagttgaagaacccatagccttcggtggcaagctgaagaacccactccaagttgtcctggtggccacccacgctgacatcatgaatgttcctcgaccggctggaggcgagtttggatatgacaaagacacatcgttgctgaaagagattaggaacaggtttggaaatgatcttcacatttcaaataagctgtttgttctggatgctggggcttctgggtcaaaggacatgaaggtacttcgaaatcatctgcaagaaatacgaagccagattgtttcggtctgtcctcccatgactcacctgtgtgagaaaatcatctccacgctgccttcctggaggaagctcaatggacccaaccagctgatgtcgctgcagcagtttgtgtacgacgtgcaggaccagctgaaccccctggccagcgaggaggacctcaggcgcattgctcagcagctccacagcacaggcgagatcaacatcatgcaaagtgaaacagttcaggacgtgctgctcctggacccccgctggctctgcacaaacgtcctggggaagttgctgtccgtggagaccccacgggcgctgcaccactaccggggccgctacaccgtggaggacatccagcgcctggtgcccgacagcgacgtggaggagctgctgcagatcctcgatgccatggacatctgcgcccgggacctgagcagcgggaccatggtggacgtcccagccctgatcaagacagacaacctgcaccgctcctgggctgatgaggaggacgaggtgatggtgtatggtggcgtgcgcatcgtgcccgtggaacacctcacccccttcccatgtggcatctttcacaaggtccaggtgaacctgtgccggtggatccaccagcaaagcacagagggcgacgcggacatccgcctgtgggtgaatggctgcaagctggccaaccgtggggccgagctgctggtgctgctggtcaaccacggccagggcattgaggtccaggtccgtggcctggagacggagaagatcaagtgctgcctgctgctggactcggtgtgcagcaccattgagaacgtcatggccaccacgctgccagggctcctgaccgtgaagcattacctgagcccccagcagctgcgggagcaccatgagcccgtcatgatctaccagccacgggacttcttccgggcacagactctgaaggaaacctcactgaccaacaccatgggggggtacaaggaaagcttcagcagcatcatgtgcttcgggtgtcacgacgtctactcacaggccagcctcggcatggacatccatgcatcagacctgaacctcctcactcggaggaaactgagtcgcctgctggacccgcccgaccccctggggaaggactggtgccttctcgccatgaacttaggcctccctgacctcgtggcaaagtacaacaccaataacggggctcccaaggatttcctccccagccccctccacgccctgctgcgggaatggaccacctaccctgagagcacagtgggcaccctcatgtccaaactgagggagctgggtcgccgggatgccgcagaccttttgctgaaggcatcctctgtgttcaaaatcaacctggatggcaatggccaggaggcctatgcctcgagctgcaacagcggcacctcttacaattccattagctctgttgtatcccggtgagggcagcctctggcttggacagggtctgtttggactgcagaaccaagggggtgatgtagcccatccttccctttggagatgctgagggtgtttcttcctgcacccacagccagggggatgccactcctccctccggcttgacctgtttctctgccgctacctccctccccgtctcattccgttgtctgtggatggtcattgcagtttaagagcagaacagatcttttactttggccgcttgaaaagctagtgtacctcctctcagtgttttggactccatctctcatcctccagtaccttgcttcttactgataattttgctggaattcctaacttttcaatgacattttttttaactatcatattgattgtcctttaaaaaagaaaagtgcatatttatccaaaatgtgtatttcttatacgcttttctgtgttataccatttcctcagcttatctcttttatatttgtaggagaaactcccatgtatggaatcccactgtatgatttataaacagacaatatgtgagtgccttttgcagaagagggtgtgtttgaaatcatcggagtcagccaggagctgtcaccaaggaaacgctacctctctgtcccttgctgtatgctgatcatcgccagaggtgcttcaccctgagttttgttttgtattgttttctgacagtttttctgttttgtttggcaaggaaaggggagaagggaatcctcctccagggtgattttatgatcagtgttgttgctctaggaagacatttttccgtttgcttttgttccaatgtcaatgtgaacgtccacatgaaacctacacactgtcatgcttcatcattccctctcatctcaggtagaaggttgacacagttgtagggttacagagacctatgtaagaattcagaagacccctgactcatcatttgtggcagtcccttataattggtgcatagcagatggtttccacatttagatcctggtttcataacttcctgtacttgaagtctaaaagcagaaaataaaggaagcaagttttcttccatgattttaaattgtgatcgagttttaaattgataggagggaacatgtcctaattcttctgtcctgagaagcatgtaatgttaatgttatatcatatgtatatatatatatgcactatgtatatacatatatattaatactggtatttttacttaatctataaaatgtcgttaaaaagttgtttgtttttttctttttttataaataaactgttgctcgttaaaaaaaaaaaaaa

SEQ ID NO: 20 - DNA, 492 bp, Homo sapiens
  misc_feature (303)..(303): n is a, c, g, or t
tttttttttttttttacagattttggcttttattctggccatcacacatttacttctaagacaacacagaccggcagtaccccatcccccatgaccactgtcacaaccccaatttcctcagccccctcctcccaccccaccccttctgccaagctccccgtatgggggctctgcctacacctcaccccgggcatgcagcatgaagtgcccgtgcagctcccccaggttgtcgaaggaatcctcacattccgtacagtggtaggttccctcctcctcctcttcctcctccttctcccgcccagntggtcggccctccccagcccgaggtggttcctcctcttcctccccgagggccctgccttcaggggctggtgcttcctggggggctgtagcagggcaacaaagccggcagggtggggttcccggtggggcctccccaaggggtgagcggccacagagctggcaaggctgggccgggggctgggctgcacg

SEQ ID NO: 21 - DNA, 2717 bp, Homo sapiens
cagggtaacgctgtcttgtggacccgcacttcccacccgagacctctcactgagcccgagccgcgcgcgacatgagccacgggaagggaaccgacatgctcccggagatcgccgccgccgtgggcttcctctccagcctcctgaggacccggggctgcgtgagcgagcagaggcttaaggtcttcagcggggcgctccaggaggcactcacagagcactacaaacaccactggtttcccgaaaagccgtccaagggctccggctaccgctgcattcgcatcaaccacaagatggaccccatcatcagcagggtggccagccagatcggactcagccagccccagctgcaccagctgctgcccagcgagctgaccctgtgggtggacccctatgaggtgtcctaccgcattggggaggacggctccatctgcgtcttgtacgaggaggccccactggccgcctcctgtgggctcctcacctgcaagaaccaagtgctgctgggccggagcagcccctccaagaactacgtgatggcagtctccagctaggcccttccgcccccgccctgggcgccgccgtgctcatgctgccgtgacaacaggccaccacatacctcaacctggggaactgtatttttaaatgaagagctatttatatatattatttttttttaagaaaggaggaaaagaaaccaaaagttttttttaagaaaaaaaatccttcaagggagctgcttggaagtggcctccccaggtgcctttggagagaactgttgcgtgcttgagtctgtgagccagtgtctgcctataggagggggagctgttagggggtagacctagccaaggagaagtgggagacgtttggctagcaccccaggaagatgtgagagggagcaagcaaggttagcaactgtgaacagagaggtcgggatttgccctgggggaggaagagaggccaagttcagagctctctgtctcccccagccagacacctgcatccctggctcctctattactcaggggcattcatgcctggacttaaacaatactatgttatcttttcttttatttttctaatgaggtcctgggcagagagtgaaaaggcctctcctgattcctactgtcctaagctgcttttcttgaaatcatgacttgtttctaattctaccctcaggggcctgtagatgttgctttccagccaggaatctaaagctttgggttttctgagggggggaggagggaactggaggttattggggttaggatggaagggaactctgcacaaaacctttgctttgctagtgctgctttgtgtgtatgtgtggcaaataatttgggggtgatttgcaatgaaattttgggacccaaagagtatccactggggatgttttttggccaaaactcttccttttggaaccacatgaaagtcttgatgctgctgccatgatccctttgagaggtggctcaaaagctacagggaactccaggtcctttattactgccttcttttcaaaagcacaactctcctctaaccctcccctcccccttcccttctggtcgggtcatagagctaccgtattttctaggacaagagttctcagtcactgtgcaatatgccccctgggtcccaggagggtctggaggaaaactggctatcagaacctcctgatgccctggtgggcttagggaaccatctctcctgctctccttgggatgatggctggctagtcagccttgcatgtattccttggctgaatgggagagtgccccatgttctgcaagactacttggtattcttgtagggccgacactaaataaaagccaaaccttgggcactgttttttctccctggtgctcagagcacctgtgggaaaggttgctgtctgtctcagtacaatccaaatttgtcgtagacttgtgcaatatatactgttgtgggttggagaaaagtggaaagctacactgggaagaaactcccttccttcaatttctcagtgacattgatgaggggtcctcaaaagacctcgagtttcccaaaccgaatcaccttaagaaggacagggctagggcatttggccaggatggccaccctcctgctgttgccccttagtgaggaatcttcaccccacttcctctacccccaggttctcctccccacagccagtcccctttcctggatttctaaactgctcaattttgactcaaaggtgctatttaccaaacactctccctacccattcctgccagctctgcctccttttcaactctccacattttgtattgccttcccagacctgcttccagtctttattgctttaaagttcactttgggcccacagacccaagagctaattttctggtttgtgggttgaaacaaagctgtgaatcactgcaggctgtgttcttgcatcttgtctgcaaacaggtccctgcctttttagaagcagcctcatggtctcatgcttaatcttgtctctcttctcttctttatgatgttcactttaaaaacaacaaaacccctgagctggactgttgagcaggcctgtctctcctattaagtaaaaataaatagtagtagtatgtttgtaagctattctgacagaaaagacaaaggttactaattgtatgatagtgtttttatatggaagaatgtacagcttatggacaaatgtacacctttttgttactttaataaaaatgtagtaggataaaaaaaaa

SEQ ID NO: 22 - DNA, 5022 bp, Homo sapiens
ccacgtcgcccaccggtgccccggcgctctcctggctcccttctgccccagctccgtctcggcggcggcgggcagttgcagtggtgcagaatggctgacctcagtcttgcagatgcattaacagaaccatctccagacattgagggagagataaagcgggacttcattgccacactagaggcagaggcctttgatgatgttgtgggagaaactgttggaaaaacagactatattcctctcctggatgttgatgagaaaaccgggaactcagagtcaaagaagaaaccgtgctcagaaactagccagattgaagatactccatcttctaaaccaacactcctagccaatggtggtcatggagtagaagggagcgatactacagggtctccaactgaattccttgaagagaaaatggcctaccaggaatacccaaatagccagaactggccagaagataccaacttttgtttccaacctgagcaagtggtcgatcctatccagactgatccctttaagatgtaccatgatgatgacctggcagatttggtctttccctccagtgcgacacgtgatacttcaatatttgcaggacaaaatgatcccttgaaagacagttacggtatgtctccctgcaacacagctgttgtacctcaggggtggtctgtggaagccttaaactctccacactcagagtcctttgtttccccagaggctgttgcagaacctcctcagccaacggcagttcccttagagctagccaaggagatagaaatggcatcagaagagaggccaccagcacaagcattggaaataatgatgggactgaagactactgacatggcaccatctaaagaaacagagatggccctcgccaaggacatggcactagctacaaaaaccgaggtggcattggctaaagatatggaatcacccaccaaattagatgtgacactggccaaggacatgcagccatccatggaatcagatatggccctagtcaaggacatggaactacccacagaaaaagaagtggccctggttaaggatgtcagatggcccacagaaacagatgtatcttcagccaagaatgtggtactgcccacagaaacagaggtagccccagccaaggatgtgacactgttgaaagaaacagagagggcatctcctataaaaatggacttagccccttccaaggacatgggaccacccaaagaaaacaagaaagaaacagagagggcatctcctataaaaatggacttggctccttccaaggacatgggaccacccaaagaaaacaagatagtcccagccaaggatttggtattactctcagaaatagaggtggcacaggctaatgacattatatcatacacagaaatatcctctgctgagaaggtggctttgtcctcagaaacagaggtagccctggccagggacatgacactgcccccggaaaccaacgtgatcttgaccaaggataaagcactacctttagaagcagaggtggccccagtcaaggacatggctcaactcccagaaacagaaatagccccggccaaggatgtggctccgtccacagtaaaagaagtgggcttgttgaaggacatgtctccactatcagaaacagaaatggctctgggcaaggatgtgactccacctccagaaacagaagtagttctcatcaagaacgtatgtctgcctccagaaatggaggtggccctgactgaggatcaggtcccagccctcaaaacagaagcacccctggctaaggatggggttctgaccctggccaacaatgtgactccagccaaagatgttccaccactctcagaaacagaggcaacaccagttccaattaaagacatggaaattgcacaaacacaaaaaggaataagtgaggattcccatttagaatctctgcaggatgtggggcagtcagctgcacctactttcatgatttcaccagaaaccatcacaggaacggggaaaaagtgcagcttgccggccgaggaggattctgtgttagaaaaactaggggaaaggaaaccatgcaacagtcaaccttctgagctttcttcagagacctcaggaatagccaggccagaagaaggaaggcctgtggtgagtgggacaggaaatgacatcaccaccccaccgaacaaggagctcccaccaagcccagagaagaaaacaaagcctttggccaccactcaacctgcaaagacttcaacatcgaaagccaaaacacagcccacttctctccctaagcagccagctcccaccaccattggtgggttgaataaaaaacccatgagccttgcttcaggcttagtgccagctgccccacccaaacgccctgccgtcgcctctgccaggccttccatcttaccttcaaaagacgtgaagccaaagcccattgcagatgcaaaggctcctgagaagcgggcctcaccatccaagccagcttctgccccagcctccagatctgggtccaagagcactcagactgttgcaaaaaccacaacagctgctgctgttgcctcaactggcccaagcagtaggagcccctccacgctcctgcccaagaagcccactgccattaagactgagggaaaacctgcagaagtcaagaagatgactgcaaagtctgtaccagctgacttgagtcgcccaaagagcacctccaccagttccatgaagaaaaccaccactctcagtgggacagcccccgctgcaggggtggttcccagccgagtcaaggccacacccatgccctcccggccctccacaactcctttcatagacaagaagcccacctcggccaaacccagctccaccaccccccggctcagccgcctggccaccaatacttctgctcctgatctgaagaatgtccgctccaaggttggctccacggaaaacatcaagcatcagcctggaggaggccgggccaaagtagagaaaaaaacagaggcagctgctacaacccgaaagcctgaatctaatgcagtcactaaaacagccggcccaattgcaagtgcacagaaacaacctgcggggaaagtccagatagtctccaaaaaagtgagctacagccatattcagtccaagtgtggttccaaggacaatattaagcatgtccctggaggtggtaatgttcagattcagaacaagaaagtggacatctctaaggtctcctccaagtgtgggtctaaggctaacatcaagcacaagcctggtggaggagatgtcaagattgaaagtcagaagttgaacttcaaggagaaggcccaggccaaggtgggatccctcgataatgtgggccacctacctgcaggaggtgctgtgaagactgagggcggtggcagcgaggctcctctgtgtccgggtccccctgctggggaggagccggccatctctgaggcagcgcctgaagctggcgcccccacttcagccagtggcctcaatggccaccccaccctgtcagggggtggtgaccaaagggaggcccagaccttggacagccagatccaggagacaagcatctaatgatgacattctggtctcgtcttccgtctcccccgtgttcccctcttgtctcccctgttcccctctcccttccctcctcccatgtcactgcagattgagacctacaggctgacgttccgggcaaatgccagggcccgcaccgaccacggggccgacattgtctcccgccccccacacttccctggcggccccaactcgggctcccgggtccttggccccctttcccgggctgtccactagaccagtgagcgcttgggcgccgtgctgggcagcccgctaggctcgccttccctcctgctttgcgtgcccggggcagcagcagccctgccccacacctcctctcactccccagcctgggcccatctccctgctttggtcttgccccatcactgcgccactgctccgtggaggaggttgggagggggttggggtggttgaggctaagttgggatctaggagaggagaaccagattctatcctcatctttttttggttctttggtccaaacccaaaagaaactgacatgccctcccttctccctggatctacctggagggaagagtggaggtggattccgagtggtgacaggacgctgaccgtggagcttaagccactgcctctccctctggtcccacaaatgggcgcccccccctccccatgcaggtggtgtcgggcccttcttgctgccctgccccaagttgggggtcagtgctgcctgtccccatgcttaacatacccgcctagctgctgtcacatttttcttgttttgtccttttatttttttctaataacctaaaaactggcaaaatagttctgcaggttgaagccatgtctacatgaaagtcctcagtaagtgttagagggaacagggcggagatatccttatgccacccccgctggaggatgtgggcagccttagggccctggaggcggtgcggcagggaagaggggtgcagaggctgtggctggtgagccggtcaggcacacaaggggcccttggagcgtggactggttggttttgccattttgttgtgtgtatgctgcttttcttttctaaccaagaggctggttttggcatctctgtcccattccctgggatctggtggtcagccctaggataaaaagccagggctggagaacaagaaagggccaggagatggaattccttcaggccggcacccacaccctaggacatgtaagccctcatgtccaagggagcctcatgcagatagtaggaaatcaggtctggaaatttaaaaataaaaggcatgagactaaggctatctgcttcccttatgccctgactggagaggggagggaggagaggcaaggcccacagagggcatcccagctaggccttgggatggctgcagtgaggagaaatcccgggaactgtattgacacaaagattcttattgcacttgtattttttgtattaaagtttgcatggtttctaataaaggattcaaacat

SEQ ID NO: 23 - DNA, 1459 bp, Homo sapiens
ccgagcttcttaaacacaggccttgggctacggctctgggggtacttgggggggcgggggcaggtctgatgagtaacccctccccccaggttccagaggaagaagcctccacatctgtctgccggcccaagagttccatggcctccacttcccgccgccaacgccgagaacgtcgctttcgtcgttacttgtctgcaggacggctggtccgggcccaggccctcctccagcgacacccaggcctcgatgtagatgctgggcagcccccaccactgcaccgggcctgtgcccgccacgatgcccctgccctgtgcctgctgcttcggctcggggctgaccctgcccaccaggaccgccatggggacacggcactgcatgctgctgcccgccagggcccagatgcctacaccgatttcttcctcccgctgctaagccgctgtccctctgccatgggaataaagaataaggatggggagacccctggccaaattttgggctggggacccccctgggattctgctgaagaggaggaagaagatgatgcctccaaggagcgggaatggagacagaagctccagggtgagctggaggacgagtggcaggaagtcatggggaggtttgaaggtgatgcctcccatgaaacccaggaacctgagtccttctcagcctggtcagatcgcctggcccgggaacatgcccagaagtgccagcagcagcagcgagaagcagagggatcctgtcgacccccacgtgctgagggctccagccagagctggcgacacgaggaggaggagcagcggctcttcagggagcgagcccgggccaaggaggaagagctgcgtgagagccgagccaggagggcgcaggaggctctaggggaccgagaacccaagccaaccagggccgggcccagggaagagcaccccagaggagcggggaggggcagcctctggcgatttggtgatgtgccctggccctgccctgggggaggggacccagaggccatggctgcagccctggtggccaggggcccccctttggaggaacagggggctctgaggaggtacttgagggtccagcaggtccgctggcaccctgaccgcttcctgcagcgattccgaagccagattgagacctgggagctgggccgtgtgatgggagcagtgacagccctttctcaggccctgaatcgccatgcagaggccctcaagtgaccctagggaagaagcaagaaacttcggggctgcagcctcaggatgaggcagaaggaagggtaagggaaaggatggggaccacaaggaagagccaggtgctgctcagcagaggatatgggtgggagcgaaagttgtaacaagtgggggtggggggtgcgggccgccaccactgctccttgactctgccgtttcctaataagacctggttccacatctcaaaaaaaaaaaaaaaaaaaaaaaaaaaa

SEQ ID NO: 24 - DNA, 3448 bp, Homo sapiens
gactgggtcatccctccaatcaacttgccagaaaactccaggggaccttttcctcaagagcttgtcaggatcaggtctgatagagataaaaacctttcactgcggtacagtgtaactgggccaggagctgaccagcctccaactggtatcttcattctcaaccccatctcgggtcagctgtcggtgacaaagcccctggatcgcgagcagatagcccggtttcatttgagggcacatgcagtagatattaatggaaatcaagtggagaaccccattgacattgtcatcaatgttattgacatgaatgacaacagacctgagttcttacaccaggtttggaatgggacagttcctgagggatcaaagcctggaacatatgtgatgaccgtaacagcaattgatgctgacgatcccaatgccctcaatgggatgttgaggtacagaatcgtgtctcaggctccaagcaccccttcacccaacatgtttacaatcaacaatgagactggtgacatcatcacagtggcagctggacttgatcgagaaaaagtgcaacagtatacgttaataattcaagctacagacatggaaggcaatcccacatatggcctttcaaacacagccacggccgtcatcacagtgacagatgtcaatgacaatcctccagagtttactgccatgacgttttatggtgaagttcctgagaacagggtagacatcatagtagctaatctaactgtgaccgataaggatcaaccccatacaccagcctggaacgcagtgtacagaatcagtggcggagatcctactggacggttcgccatccagaccgacccaaacagcaacgacgggttagtcaccgtggtcaaaccaatcgactttgaaacaaataggatgtttgtccttactgttgctgcagaaaatcaagtgccattagccaagggaattcagcacccgcctcagtcaactgcaaccgtgtctgttacagttattgacgtaaatgaaaacccttattttgcccccaatcctaagatcattcgccaagaagaagggcttcatgccggtaccatgttgacaacattcactgctcaggacccagatcgatatatgcagcaaaatattagatacactaaattatctgatcctgccaattggctaaaaatagatcctgtgaatggacaaataactacaattgctgttttggaccgagaatcaccaaatgtgaaaaacaatatatataatgctactttccttgcttctgacaatggaattcctcctatgagtggaacaggaacgctgcagatctatttacttgatattaatgacaatgcccctcaagtgttacctcaagaggcagagacttgcgaaactccagaccccaattcaattaatattacagcacttgattatgacattgatccaaatgctggaccatttgcttttgatcttcctttatctccagtgactattaagagaaattggaccatcactcggcttaatggtgattttgctcagcttaatttaaagataaaatttcttgaagctggtatctatgaagttcccatcataatcacagattcgggtaatcctcccaaatcaaatatttccatcctgcgcgtgaaggtttgccagtgtgactccaacggggactgcacagatgtggacaggattgtgggtgcggggcttggcaccggtgccatcattgccatcctgctctgcatcatcatcctgcttatccttgtgctgatgtttgtggtatggatgaaacgccgggataaagaacgccaggccaaacaacttttaattgatccagaagatgatgtaagagataatattttaaaatatgatgaagaaggtggaggagaagaagaccaggactatgacttgagccagctgcagcagcctgacactgtggagcctgatgccatcaagcctgtgggaatccgacgaatggatgaaagacccatccacgccgagccccagtatccggtccgatctgcagccccacaccctggagacattggggacttcattaatgagggccttaaagcggctgacaatgaccccacagctccaccatatgactccctgttagtgtttgactatgaaggcagtggctccactgctgggtccttgagctcccttaattcctcaagtagtggtggtgagcaggactatgattacctgaacgactgggggccacggttcaagaaacttgctgacatgtatggtggaggtgatgactgaacttcagggtgaacttggtttttggacaagtacaaacaatttcaactgatattcccaaaaagcattcagaagctaggctttaactttgtagtctactagcacagtgcctgctggaggctttggcataggctgcaaaccaatttgggctcagagggaatatcagtgatccatactgtttggaaaaacactgagctcagttacacttgaattttacagtacagaagcactgggattttatgtgcctttttgtacctttttcagattggaattagttttctgtttaaggctttaatggtactgatttctgaaacgataagtaaaagacaaaatattttgtggtgggagcagtaagttaaaccatgatatgcttcaacacgcttttgttacattgcatttgcttttattaaaatacaaaattaaacaaacaaaaaaactcatggagcgattttattatcttgggggatgagaccatgagattggaaaatgtacattacttctagttttagactttagtttgttttttttttttttcactaaaatcttaaaacttactcagctggttgcaaataaagggagttttcatatcaccaatttgtagcaaaattgaattttttcataaactagaatgttagacacattttggtcttaatccatgtacacctttttatttctgtatttttccacttcactgtaaaaatagtatgtgtacataatgttttattggcatacgtctatggagaagtgcagaaacttcagaacatgtgtatgtattatttggactatggattcaggttttttgcatgtttatatctttcgttatggataaagtatttacaaaacagtgacatttgattcaattgttgagctgtagttagaatactcaatttttaatttttttaatttttttattttttattttctttttggtttggggagggagaaaagttcttagcacaaatgttttacataatttgtaccaaaaaaaaaaaaaaaggaaaggaaagaaaggggtggcctgacactggtggcactactaagtgtgtgtttttttaaaaaaaaaatggaaaaaaaaaagcctttaaactggagagacttctgacaacagctttgcctctgtattgtgtaccagaatataaatgatacacctctgaccccagcgttctgaataaaatgctaattttggataacaaaaaaaggggaattc

SEQ ID NO: 25 - DNA, 1111 bp, Homo sapiens
tcaaggtaactctgggctacagagtccttgctgggggttcggggagcgcttggaccccggcttctgggacgcgtcaggagaagggagcactggctttgctttcatcaggccaaagatgcctttctttgggaatacgttcagtccgaagaagacacctcctcggaagtcggcatctctctccaacctgcattctttggatcgatcaacccgggaggtggagctgggcttggaatacggatccccgactatgaacctggcagggcaaagcctgaagtttgaaaatggccagtggatagcagagacaggggttagtggcggtgtggaccggagggaggttcagcgccttcgcaggcggaaccagcagttggaggaagagaacaatctcttgcggctgaaagtggacatcttattagacatgctttcagagtccactgctgaatcccacttaatggagaaggaactggatgaactgaggatcagccggaagagaaaatgaagaccccagagacatttattggggagtaggatgtggctgagtgctttttttttggccagactagcggattcagtcctggaagagagtatcatataatgagacccacaggcactggcacccttgggttggcaatagaaggtgacatggaatggagaaaaccaagattccagatggggatagtaactagaaggtgcttcagatgcactgcctgcgggtgccagtctgaaaaccagaccgcacagaggcctggggctgctgatgagctttttggtgctctccacacacaagctcgcaaacacacatgtcccagaatagctctgttgggttgtgttgggagaagcggctggagttcattctctcacccccttatgttggtgtttggcgtgtgacagcagttctacagagctctgtgttggggtcatggatgagcggctctcttggctcttaaaggcaggcctctctcttcttgcctttaaagaatcctccttcctcacacctggcctcctctggcttcagcttctcagcagcaagcaccagccttccacaacaacactatatttttatgctactttcctgtttgcactactacttttttattaaacgatgttaaataat

SEQ ID NO: 26 - DNA, 6280 bp, Homo sapiens
ggtgaaggacctgggcagcctcaatgggacgtttgtgaatgacatgcgcatcccggaccagaagtacgtcacgctgaagctcaacgatgtcatccgctttggctacgattccaacatgtatgtgctggagcgtgtgcagcaccgagtcccggaggaggcactcaagcatgaaaagtacaccagccagctgcaggtgagcgtgaagggtttggcgcccaagaggagcgaggcactgccggaacacacaccatactgcgaggcctcgaaccccaggccggagaagggggaccggagaccaggaacagaggcagcctcttaccgcacacccctgtatgggcagccctcctggtggggtgaggacgatggtagcacgctgcctgatgcccagcgccagggagagccctacccagagcgccccaagggacccgtgcagcaggacggggagctccacggcttccgcgcccctgctgagcctcagggctgctcgttccggcgggagcccagctacttcgagatccccacgaaggagaccccgcagccgtcgcagccccccgaggtgccggcacacgagatgcccacgaaggatgcagaggcaggtgggggcggagcggcccctgtggtgcagagccacgcctccttcaccatcgagtttgatgactgcagccctggcaagatgaagatcaaggaccatatcaccaagttttccctgcgccagcggcggcccccgggcaaggaggccacacctggcgagatggtgtcggctgagaccaaggtggccgactggctggtgcagaatgacccgagcctgctgcaccgggttggccctggggatgaccgccacagcaccaagagcgacctgcctgtccacacccgcaccctgaagggccacaagcacgaggacggcacgcagagtgactcagaggaccccctggccaaggcggcctcggccgctggggtgcccttggaggccagcggggggcaggtgcggctgcagaggcagatcaagcgggacccccaggagctactacataaccagcaggcctttgtcatcgagttcttcgacgaggacacgccccgaaagaagcgctcccagtccttcacgcacagcccgtccggggaccccaaggccgacaagcgccgtggcccaacgccggccgatagggaccgccccagtgtcccagccccagtccaggcagggggccgcagctcggggccacagagggccggctcgctcaagcgggagaagacagaggaacggctgggcagcccctcgcccgcctcccgaacccctgcccgccccttcggaagcgtggggcgccgctcccgcctggcccaggacttcatggcccagtgtctgcgggagagctccccggccgcccggcccagccccgagaaggttcctccggtgctgcccgctcccctgacaccccatgggaccagccccgtgggccccccgaccccaccgcccgcccccacggacccccagctgaccaaggcacggaaacaggaggaggatgacagcctcagtgacgcagggacatacaccatcgagaccgaggcgcaggacacggaggtggaggaggctcggaagatgatcgaccaggtctttggggtgttggagtcccctgaactctccagggcatcttcggccacctttcgcccagtcatcagaggggacagagatgagtctgatgacgggggcgtggcccagcggatggcgctactgcaggagtttgcctcccggccactgggtgcggccccccaggcggagcaccagggcctcccggtgccgggctcccctgggggtcagaagtgggtgtcccgctgggccagcctggctgacagctactcagacccgggcctcacagaggatggcctgggacgtagaggcggggagccggaggggtccctgcctgtgcgcatgcggcgacggctccctcagctgcccagtgagagggctgacagccctgcgggcccagagagcagcaggaggagtgggcctgggccaccggagctggacagtgagcagcccagccgcctcttcggccaggaggagttggatcctgacagcctcagcgatgccagtgggtcggacgggggccgaggccccgagccaggggtggagccacaggacagcagacgcaggagcccccaggaggggcccacgtggagcaggggtcggcgctcaccaagggcccccggggagccaactcccgcctctttcttcattggggaccagaatggggacgctgtgttatctaggaaactgcttgcggctccaggggatggggagggcctagggcagacagcccagcccagccccccagcacgggatggcgtctatgtcagtgccaatgggagaatggtcatccagctacggcctggacggtccccagaacccgacggccctgccccagcctttctccggcaagagagcttcactaaggagccagccagtggtcccccagcgcccggcaagcccccccacatctccagccacccgcttctacaggacctggccgctacccgggccgcacgcatggacttccactcccaggacacccacctgatcttgaaggagacggagacggccctggcggccctggaggcccgactcctctctaattctgtggatgccgagtgtgaggggggcagcaccccgaggccgccggaggacgccctgtctggggactcggacgtggacacagccagcaccgtcagcctgcgtagtggcaagagcgggcccagccccacaaccccccagcctctgcgggcacagaaggagatgtcgccatccccgccagctgcacaggacccgggaggcaccgccctggtcagtgcccgtgagcagtcctcagagaggcagcatcacccacttggcccgacggacatgggccgtggagagccggtacggcgctcagccataaggcgtggccacaggccccgagggtccctggattggcccagtgaggagcgtggccctgtcctcgcccacctacccagctcagatgtgatggcctccaaccacgaaacccctgaggccaccggggcaggacggctaggttctcgccggaaaccagcggccccaccgccatccccagctgcccgggaggagcagagccgtagctcagccagctcccagaaggggccgcaggccttgacccgctccaacagcctgtccacccctcgccccacacgggcctcccggctgaggcgggcccggctgggggacgcttcagacactgaggctgcggatggtgagcgggggtccctgggcaaccctgagcccgtgggccggccagctgctgagcaggccaagaagctgtcacgcctggacatcctggccatgccccggaagcgggccggctccttcacagggactagtgaccccgaggcagcccctgcccgcaccagcttctctggccgcagtgtggagttgtgctgtgccagccgcaagcccaccatggccgaagcacgggctgtctccaggaaggctgccaacacagccaccaccacgggtccccgccagcccttcagcagggcccgctcgggcagtgcccgatacacctccaccactcagaccccgagggctggcagctccagccgggctcgttcccgggcccccggcccccgggacacggacgacgatgaggaggagcctgacccttatggtttcatcgtgcagacggcagagattgcggagattgccaggctgagccagacgctggtgaaggacgtggccatcctagcccaggagatccacgatgtggctggggacggtgacacactgggctcctcggagcctgcccacagcgcctccctcagcaacatgcccagcacccccgcctcgaccatctctgcccgggaggagctggtgcagcgcatccccgaggccagcctcaacttccagaaggtgccgcccggctcgctgaactctcgggactttgaccagaacatgaacgacagctgtgaggacgccctggccaacaagacgcggcctcggaaccgagaggaggtgatcttcgataacctgatgctgaacccggtgtcccagctgtcgcaggccatccgtgagaacacagagcaccttgccgagaagatgaagatcctctttcagaacacagggagagcttgggaggacctggaagccaggatcaacgccgagaacgaggtgcccatcctgaagacatctaacaaggaaatcagctccatcctgaaggaactgaggcgggtgcagaaacagctggaagttatcaatgccatcgtggaccccagtgggagcctggacctgctcacaggaaacaggagcttggccagctctgcacagccggggctggggaagggccgcgtggctgcccagagcccaccctcacccgcctcagccgaggccctgctgccagccctgcccctgaggaatttcccacagcgggccagctgtgggcctcccagcctcccggaccccaccttcctccctgatgccgagaggttcctgatctaggccccagacctggccaggccagcctccctgtgcgtgtgcgtctctgccttccgtccgccgcacacccgcctgcctggccgcaggtggttctccctgaagacccccacatgtgccatatccctgtgggcgggtgcctcccacgcccttgccccctcgtcagctcccagccagcaccctactcaccctgtccagccccatggccacccccacccctgcctcgccccctacaggcctctgggcccagctcctggccaggctgctgccaaggtcaagccctcaagggcattaccccgcctcctcttcatcactgttatttttgtctttagctttaaaggaaagagttgttggtgccattgcaggtgccccctccaggcctgactggctccgccaggcactaacctgccataaccctttgtgctggcctgcggccaggcagaggaagagaggtcgactgtggggtcatttggtgccaaacatggaggtgggcaggctcacctgttcctgggactgtctgagatggcagggcacttgccctggtggctcccacctgaccccaggccttttataggcaggagccccactgcttccagcctctggtgccaacacagttgccaaacccattgagcttggggctgccccgtggaggcctcctgggtatggaccaggggcttgttgagagctgagccatgcacacaggtgcagacaccccccaactcccatgcacacggctagtccaggcgcctccacgctgcaccgtgaggactgcagggcatgtccccgtgaggggctatgggcctctgtaggtgggcttccaaggtcctgggtgcagccgggtgcatggcagcccttctggcgggggtgagcgcacgaccaaagtcactggaagccgggtttccggaagctcgcagcttggcctgcaccacacgccctccccttttggcttcacgccatcaggcctcaagtgggcatgggggcagggacgggcccaggaactgttgttttctcaggattctttcagctgggaacatggcaggtgagcagagcttggtgcctctgccgtggcccctgctggggcagcccgtgttgccggagcctctaagccaaagagcccgttggccgtggttggtgggggtggacgtgggggtgtcccacctggaccagactggcgtgggtgagctccacaccctgcctggcaatggtatgagagtcggacctggacagggccagctgctgggggagcggcactggggactggaggctggaagcgggtggtgtgtgtcccctgtttacttttagctgagctggggttgggtgtacgggttctgttcctctgagccctgcggcccacctgatgtttacgtgtgtgtgtgagggggggcgggggtggcaggtgtccccccctggtccccgccccaagagcctgctgtctgtatggaggaggtgctagcccggtccaccgggctgctgcccacccctgcatgccccagttgcccaccccgcctgcccctggacatgaagtggtcacgcttcatccacggctccttcccacccctcggcagtggctgtgcaatgttttaagttcacaagttcctgctcctccccacactgagctcctttgttcctccccctccagcctttgcctgggaactggtccttgtttgccgggcttctcggagggttcactgtacattcgttctcaggtggtcttgtggctgtctttcggaaaatggttattttatatgatttgtcatggaatttgttctaataaatcattcttctatc

SEQ ID NO: 27 - DNA, 2579 bp, Homo sapiens
tgagaccgtcagaagcctcatagacagaacgattgatgaagtagttgagaaaggatttgaagatgatcgaattgaggctttacttcataaaattgaaatacagatgaaacatcagtctaccagctttgggctgatgctgacatcagtaagtgatctctcaacaattttgtttttgttttataatagacattttgtcttgttactagcttaactggcattttgatatttttatgtgaaatagattactttaaatgggtaagggtttataactagtaatctgttggttatttcctaaacattatttcagcctgtgctttttattttattggaacaaaacagggctaaagtaagtttttttgtttctccatccaaagaattacatgacttttgttataaacaatcatctgtggtatatttaaatacagaaactaggattttagtatcaagtctgggctgttggtggaggttgtactgtggtaccagctgcattgtggatgtggaaatcttccttccagtacatagcttcttgctggaaccatgatggggaccctgtggagctcttgaagttgggaaatcagttagctaaattcagacagtgcctgcaggaaaatccaaaatttttgcaagaaaaagtaaaacagtattttaagaataaccagcataagctgactttatcgatgaggccagatgacaagtatcacgagaagcaggcacaggtggaagccacgaagctcaagcagaaggtcgaggctctgtcccccggagacaggcagcagatctacgagaaaggtctagaattacggagtcaacaaagcaaacctcaagatgcctcttgtctgccagcgttgaaagtttccgatattgaacccaccatacctgtcacagagttggacgtggtcctgacagctggagatatccctgttcagtactgcgcccagcccaccaatggcatggtgtatttccgggccttctccagcctgaacacactccccgaggagctgaggccctatgtgcccctcttctgcagcgtcctcaccaagctgggctgcggccttcttgactaccgggagcaggctcagcagatagaattgaagaccggagggatgagtgcttctccccacgtgctccccgacgactcacacatggacacctacgagcagggtgtgcttttctcctctctctgcctggatcgaaacctgccagacatgatgcagctatggagtgaaatatttaacaacccgtgctttgaagaagaggagcacttcaaggtgctggtgaagatgaccgcccaggagctcgccaatggaattcctgactctgggcacctgtacgcatccatcagggcaggccggaccctcacgcccgcaggggacctgcaggagaccttcagcgggatggatcaggtgcggctgatgaagaggattgcagaaatgacagatatcaaacccatcctgaggaagctcccacgtatcaagaaacacttgttaaatggtgataatatgaggtgttcagtgaatgcgactcctcagcagatgcctcagacagaaaaagcggtcgaagacttccttagaagcatcggtcggagtaaaaaggaacggaggcctgtgcgcccacacacggtcgagaaacctgtgcccagcagctctggtggagatgcccacgttccccatggctcccaggtcattaggaagctggtcatggaacccaccttcaagccctggcagatgaagactcacttcctgatgcccttcccggtgaattacgtgggtgaatgcatccgaactgtcccctacacggacccagatcatgccagtcttaaaatccttgcacgtttgatgactgccaaattcttgcatacagaaattcgagaaaaaggcggtgcttatggtggaggcgcaaaactcagccacaatgggattttcaccctttactcttacagggacccaaatacaatagagacgctccagtcttttgggaaggctgtcgactgggctaagtctggaaaattcacacagcaagacatcgacgaagccaaactttctgtcttctcaaccgtagatgctcctgtcgctccttcagacaaaggaatggaccacttcttgtacggcctctcggatgagatgaagcaggcccacagagagcagctctttgctgtcagccacgacaagctcctggccgtgagcgatagatacctcggcactgggaagagcacacacggcctggccatcctcggacccgagaacccgaaaattgccaaggacccatcctggatcatccgatgagcagccgtggcgctcgactgcacaggagcccgagacaatacacctccgagctgaatatgaaaagtcagaaatgctactgctttttccaagaatattatgtcattgagtgtcgccaaagcccttgactggcgagtcaaaaactcagatctatcttaagagtgaccaggaagaggttcattgaaataatcatgcatgaagcgccaaagatgcaccatgtagaattttcactttgtactggcaggctcgttttacctcattctagaatatttaagaatctaaaaataaagggcaactctg

SEQ ID NO: 28 - DNA, 5767 bp, Homo sapiens
gagggaggagagttcacttttacttcagtgtcagcgcgcggcggccgtggctggctctggcgagagagcaccgagggagtgggtcgcagatcttcgggcggctaggggaaatcggcgagaggcgggatccgagcgcgccggcggggcgcagagcccgcgagcctggccagcgagggtagccgcggggggcgcgccccgggcgggcccccggagacgcgcaggatgccacacgaagagctgccgtcgctgcagagaccccgctatggctctattgtggacgatgaaaggctctctgcagaggagatggatgagaggaggcggcagaacattgcttatgaatatctgtgccacttagaggaagccaaaaggtggatggaagtttgcttagttgaagaattgccaccaaccactgaattggaagaagggctccggaatggagtttaccttgcaaagttagccaagttctttgccccgaaaatggtatcagagaaaaagatctatgatgtggaacaaacacgttataagaagtctggccttcattttcgacacacagataataccgtccagtggttaagagcgatggagtctattggtctacccaagatattttatccagaaacaacagatgtctatgatcggaaaaacataccaagaatgatatattgcattcacgcactgagtttgtatctgttcaaactaggaatagcaccccagatccaggatttgttgggcaaagtagacttcacagaggaggaaatcagtaatatgagaaaagaacttgagaaatatggaatacagatgccatctttcagcaaaataggtggtattctggccaatgaactgtccgtggatgaagctgcattacatgctgcagttatagccattaatgaagcagttgaaaaaggaatagcagagcaaaccgttgtaacactaagaaacccaaatgcggttttaactttagtggatgacaaccttgcaccagaatatcagaaagaactctgggatgccaaaaagaaaaaagaggaaaatgcaagactgaagaatagctgtatttcagaagaagaaagagatgcttatgaagaactgctgacacaagcagaaatccaaggcaatattaataaagtcaacaggcaggctgcagtggaccatatcaatgctgtcattccggaaggtgaccccgagaatacgctgcttgcactgaagaaaccagaggcccagctgcctgctgtttatccctttgctgctgccatgtatcagaacgaacttttcaacctccagaaacagaacaccatgaactacttggcccacgaggagcttttgattgctgtggaaatgttgtctgctgttgctttactaaaccaggccttggaaagcaacgatcttgtgtctgtgcagaatcaactcagaagccccgcaataggcttaaacaatctggacaaggcatatgtggaacgttatgcaaacacactactctctgttaaactagaagttttatcccaagggcaagataacttaagctggaatgaaattcagaattgtattgatatggttaatgctcaaattcaagaagaaaatgaccgagttgtagctgtagggtacatcaatgaagctattgatgaagggaatcctttgaggactttagaaactttgctcctacctactgcgaatattagtgatgtggacccagcccatgcccagcactaccaggatgttttataccatgctaaatcacagaaactcggagactctgagagtgtttccaaagtgctttggctggatgagatacagcaagccgtcgatgaggccaacgtggacgaggacagagcaaaacaatgggttactctggtggttgatgttaatcagtgtttggaaggaaaaaaatcaagtgatattttgtctgtattgaagtcttccacttctaatgcaaatgacataatcccggagtgtgctgacaaatactatgatgcccttgtgaaggcaaaagagctcaaatctgaaagagtgtctagtgacggttcatggctcaaactcaacctgcacaaaaaatatgactactattacaacactgattcaaaagagagttcctgggtcacacctgaatcatgcttctataaagaatcatggctcacaggaaaagaaatcgaggacattattgaggaagtcacagtaggttacattcgtgagaatatatggtctgcttcagaagagttgcttcttcgctttcaagccacaagctcaggacccatccttagggaagagtttgaagctagaaaatcatttttgcatgaacaagaagagaatgtggtcaaaatacaggctttttggaaaggatataaacaacggaaggagtatatgcacaggcggcaaacgttcattgataatactgattctgttgtgaagattcagtcctggttccgaatggcaactgcaagaaagagctatctttcaagactacagtatttcagagatcataataatgaaattgtgaaaatacagtcactgttgagagcgaacaaagctagagatgactacaaaacattggttggctctgaaaacccaccattaacagtaattcgcaaatttgtatacctgctggaccaaagtgatttggatttccaggaggaactagaggttgcacgattaagggaagaagtagtgaccaagatcagggccaatcaacagctggaaaaagacctgaacctgatggacatcaagattggactgctggtgaagaacaggatcacactagaggatgtaatttcacacagtaaaaagctgaacaagaaaaaaggaggagaaatggaaatactgaataacaccgacaaccaaggaataaaaagtttgagtaaggagaggagaaaaacactagaaacatatcagcagctgttttaccttttacagaccaaccctttatacttggctaagctgattttccagatgccacagaacaagtccactaaatttatggatactgttattttcacactatataattatgcctctaatcagcgagaagaatatctacttctcaagctttttaaaactgctctggaggaagaaataaaatcaaaagtggaccaggtacaggacatagttactggtaaccctacagtcatcaagatggtcgtcagcttcaatagaggtgcccggggacagaacaccctgcgccaactcctggctccagtggtaaaagagatcatcgacgacaagtcgctgattatcaacacaaaccctgtagaggtgtacaaggcttgggtgaaccaactagaaacacagactggagaggccagcaagttgccttatgatgtgaccacagaacaagctctaacatacccagaagtgaaaaataaactggaggcttccattgagaacctgagaagggtcaccgacaaagtcctgaattctatcatttcttcccttgatctactgccttatggattgaggtatatagccaaagtactgaagaattcgatccatgagaaattccccgatgcaacagaagatgagctattaaagattgttggaaacctcctgtactatcggtacatgaatccagccattgtagctccagatggctttgatatcatcgacatgacagctggaggtcagataaattctgaccaaaggagaaacttaggatcagtggccaaggttcttcagcacgcagcctccaacaagctgtttgaaggagaaaatgagcatctctcatctatgaacaattatttatcagagacgtatcaggaattcaggaaatatttcaaagaagcatgtaatgtccctgagccagaagagaagtttaatatggacaaatacacagacctggtgacagtcagcaaaccagtcatttatatttcaattgaagaaatcatcagcacacactcactcctgttggaacaccaggatgcaattgcccctgagaaaaatgacttactgagtgaattgctggggtcgctgggagaggtgccaaccgtggaatcttttcttggggaaggagcagttgaccccaatgaccctaacaaggcaaatacactaagtcagctttcaaagaccgagatttctcttgtcttgacaagcaaatatgacatagaggacggtgaagctatagatagccgaagcctcatgataaagaccaagaagctgataattgatgtgatccggaaccagccagggaacacattgacagaaatcttagagacaccagcaactgcgcaacaggaggtagaccatgccacggacatggtgagccgtgcaatgatagattccaggactccagaagaaatgaagcatagccaatctatgattgaagatgcacagctgcctcttgagcagaagaagaggaaaatccagaggaatcttcggacgttggaacagactggacacgtgtcatccgaaaataaataccaagacattctcaatgagattgccaaggatattcgaaatcaaagaatctatcgtaagcttcgaaaagctgaattggcaaaacttcagcagaccctgaatgcacttaacaagaaggcagcattttatgaagagcaaatcaattattatgacacctacataaagacttgtttagacaacttaaaaagaaaaaatactcggagatcaattaaactagatggaaaaggagaacccaaaggggcgaagagagcgaagccagtgaagtacactgcagcaaagctgcatgagaaaggtgtcctgctagatatagatgatcttcaaacaaaccagtttaagaatgttacatttgatatcatagctactgaagatgtaggcattttcgatgtaagatcaaaattccttggtgttgagatggaaaaggtgcaactcaatattcaggatttacttcagatgcaatatgaaggagtagctgtaatgaaaatgtttgataaggttaaagtgaatgtaaaccttctcatatacctgctgaacaagaagttctatggaaagtgaagtgcctacagaaatttcttggattctgtatcatctggattaggaaatgaatttgtttaatatttttgtttttaaacatgattgaaatcactgcttataaatgtgtgattttttttaaatgaccaaaactgttctgaagaatgtacccaggtgcctttttgctaatttgatactataatagaatgagacataaaatgaattaatggaaacatatccacactgtactgtgatataggtactctgatttaaaactttggacatcctgtgatctgttttaaagttggggggtgggaaatttagctgactagggacaaacatgtaaacctattttcctatgaaaaaagttttaaatgtcccacttgaataacgtaattcttcatagtttttttaatctatggataaatggaaacctaattatttgtaatgaattatttagacagttctaagccctgtcttctgggagttatcaattttaaagagaacttttgtgcaattcaaatgaagtttttataagtaattgaaaatgacaacacaataacactttctgtataaaagtatatattttatgtgatttattcctactaaatgaaagtgcactactgcctcatgtaaagactcttgcacgcagagcctttaagtgactaaggaacaacatagatagtgagcatagtccccacctccacccctcacaatttatttgaatacttcaattgtgcctctcaattttttgtaatgctaaaaaatcagtatctagatggtttttaaatgtattctctggaaattgttttatgtaaaataaatgttacttaattccatt

SEQ ID NO: 29 - DNA, 5632 bp, Homo sapiens
gacaaagagaactaatgctttgtgctgattcatatttgaatcgaggcattgggaaccctgtatgccttgtttgtggaaagaaccagtgacaccatcactgagcttcctaaaagttcgaagaagttagaggactatacactttcttttgaacttttataataaatatttgctctggtttttggaacccagggctgttagaggggtgagtgacaagtcttacaagtggccttattccaactccagaaattgcccaacggaactttgagattatatgcaatcgaaagtgacaggaaacatgccaactcaatccctcttaatgtacatggatgggccagaagtgattggcagctctcttggcagtccgatggagatggaggatgccttgtcaatgaaagggaccgctgttgttccattccgagctacacaagaaaaaaatgtcatccaaatcgaggggtatatgcccttggattgcatgttctgcagccagaccttcacacattcagaagaccttaataaacatgtcttaatgcaacaccggcctaccctctgtgaaccagcagttcttcgggttgaagcagagtatctcagtccgcttgataaaagtcaagtgcgaacagaacctcccaaggaaaagaattgcaaggaaaatgaatttagctgtgaggtatgtgggcagacatttagagtcgcttttgatgttgagatccacatgagaacacacaaagattctttcacttacgggtgtaacatgtgcggaagaagattcaaggagccttggtttcttaaaaatcacatgcggacacataatggcaaatcgggggccagaagcaaactgcagcaaggcttggagagtagtccagcaacgatcaacgaggtcgtccaggtgcacgcggccgagagcatctcctctccttacaaaatctgcatggtttgtggcttcctatttccaaataaagaaagtctaattgagcaccgcaaggtgcacaccaaaaaaactgctttcggtaccagcagcgcgcagacagactctccacaaggaggaatgccgtcctcgagggaggacttcctgcagttgttcaacttgagaccaaaatctcaccctgaaacggggaagaagcctgtcagatgcatccctcagctcgatccgttcaccaccttccaggcttggcagctggctaccaaaggaaaagttgccatttgccaagaagtgaaggaatcggggcaagaagggagcaccgacaacgacgattcgagttccgagaaggagcttggagaaacaaataagggcagttgtgcaggcctctcgcaagagaaagagaagtgcaaacactcccacggcgaagcgccctccgtggacgcggatcccaagttacccagtagcaaggagaagcccactcactgctccgagtgcggcaaagctttcagaacctaccaccagctggtcttgcactccagggtccacaagaaggaccggagggccggcgcggagtcgcccaccatgtctgtggacgggaggcagccggggacgtgttctcctgacctcgccgcccctctggatgaaaatggagccgtggatcgaggggaaggtggttctgaagacggatctgaggatgggcttcccgaaggaatccatctggataaaaatgatgatggaggaaaaataaaacatcttacatcttcaagagagtgtagttattgtggaaagtttttccgttcaaattattacctcaatattcatctcagaacgcatacaggtgaaaaaccatacaaatgtgaattttgtgaatatgctgcagcccagaagacatctctgaggtatcacttggagagacatcacaaggaaaaacaaaccgatgttgctgctgaagtcaagaacgatggtaaaaatcaggacactgaagatgcactattaaccgctgacagtgcgcaaaccaaaaatttgaaaagattttttgatggtgccaaagatgttacaggcagtccacctgcaaagcagcttaaggagatgccttctgtttttcagaatgttctgggcagcgctgtcctctcaccagcacacaaagatactcaggatttccataaaaatgcagctgatgacagtgctgataaagtgaataaaaaccctacccctgcttacctggacctgttaaaaaagagatcagcagttgaaactcaggcaaataacctcatctgtagaaccaaggcggatgttactcctcctccggatggcagtaccacccataaccttgaagttagccccaaagagaagcaaacggagaccgcagctgactgcagatacaggccaagtgtggattgtcacgaaaaacctttaaatttatccgtgggggctcttcacaattgcccggcaatttctttgagtaaaagtttgattccaagtatcacctgtccattttgtaccttcaagacattttatccagaagttttaatgatgcaccagagactggagcataaatacaatcctgacgttcataaaaactgtcgaaacaagtccttgcttagaagtcgacgtaccggatgcccgccagcgttgctgggaaaagatgtgcctcccctctctagtttctgtaaacccaagcccaagtctgctttcccggcgcagtccaaatccctgccatctgcgaaggggaagcagagccctcctgggccaggcaaggcccctctgacttcagggatagactctagcactttagccccaagtaacctgaagtcccacagaccacagcagaatgtgggggtccaaggggccgccaccaggcaacagcaatctgagatgtttcctaaaaccagtgtttcccctgcaccggataagacaaaaagacccgagacaaaattgaaacctcttccagtagctccttctcagcccaccctcggcagcagtaacatcaatggttccatcgactaccccgccaagaacgacagcccgtgggcacctccgggaagagactatttctgtaatcggagtgccagcaatactgcagcagaatttggtgagccccttccaaaaagactgaagtccagcgtggttgcccttgacgttgaccagcccggggccaattacagaagaggctatgaccttcccaagtaccatatggtcagaggcatcacatcactgttaccgcaggactgtgtgtatccgtcgcaggcgctgcctcccaaaccaaggttcctgagctccagcgaggtcgattctccaaatgtgctgactgttcagaagccctatggtggctccgggccactttacacttgtgtgcctgctggtagtccagcatccagctcgacgttagaaggaaaaaggcctgtgtcatatcaacacttatctaacagcatggcacaaaagagaaactatgagaattttattgggaatgcacattatcgaccaaatgacaaaaaaacttgattcactaattagggggaaaaaaggtcttggtggatgtcagtgcttactccccatgaaattaaattttacttcatcctttgagaagcgaatggtgaaagctactgaaataagctgtgattgtactgtacataaaacatatgaggaatctgcaaggaacactacagttgtgtaaagttgttctgttaacttttgtaccaaatagcaatacaaactagttggaacagttggaacttacatacatggggactggaaatctctattttgtccctgaataatatttttcttagaattgaccaaataagaagtggaatttttgcatacttgagcgctgctgaaaagaaatcatttgggttgggtggggcgggatgggggaaaagtatataatgcttgcacctcaggtaaaaatctgtaaatatctaagttgtaaacctgcttgttcaaatactgtgtgtattccttttctctaatgcagctcatcacttggagcagtttctgctattgtgctctttcatttaaaatgtatgtttttttttttttaaactgtcaatgattttgtattatgttgaatccacccaaatctattgttgtcttaaaattgttaatggaagtattgaccctctatgatatgtgctgcagatatcgaggtcagccattcggaagctggcagcattttatcgcaactttgagcatctcagatggggaaggcaccttcttcctcgcctctccagattgtcctggaacctccaggatccttgactgagggcgttgggatggcttgtaggatttttaagagagtgtgtctacagacaagcattttctctgtagagcagccacacgttgtataaacataaactgtatgtgcagttatttaaatttgtttctgtcaaattaatcatttttgttggacgattcagtggcgggggggttttgcctaaattagtatataaaaacaaaaatgctaaattatatctgtgaattgcaggtattggggaacagttttaagggaaattttggggggaacattttaggtttgtatttggtagtcttaatgtatctggcatttgggtgaactgtggacatactagagttgattatagacacattgattttgaataaggaactgctggccgagcccgctgggagtctagaaagagaaaatctgtttctagacctcagttattttcccatttttggttgttttgaagcagtaacatttttctcagtgcacatgcaatttgggttttagagaagatggccaccagctggcttcctagatattttaaacttttgttctttaatatgctgtccatggctgagtttattagtacatgggcttagtgaccacaaaatattttattaagaaactgtttcaaaaataaatttgcactgttcatttttctggcctcgctgttctccatagagcaagggtaatcctagaaaaaattttttttttttaaattatgcaacgtaagatgtcctccttgatagaagtcttagctcctgtgttacaagggagaactcatttgagatcagtctgttggcattgcaatgaagtgctttgtatcaggaaagtgtacactattgaccttttttcctgttcacaagctgagccatatgtacataatctagattttgttttcatagttttgcacttttatagcctatttttgaagattaacacatttgcaagatgattgactcaatctttgcctaatccaatgagtgttacagagagcttgctgtgactagaaccataaatcttaaagggggtatgtgataatagagggctggaatttaaacctgtatttaaaaaaaagaatcaccaaatctatttgaaaacaagtcgatttgtattatgctggaattttttgggctttcagatttctctttttaaccacatttctgaatgtataaaaataccaattattttcctacagccctttgtacttcaaaatatgtttttgtgtccatcagtattaactattggtatactactggttttatatttttttttctttgagacaacagtacatataatagaggtacaattcgttggatttttgtttatgtatttatttcattccagtttgatttattttaattgttgatacttaagttgtcaaacagtagacattacgtgttttatttatgatatatttcagcttaaagttatgttattatatgtggaagtgtaaatatagatttggtgttttg

SEQ ID NO: 30 - DNA, 1861 bp, Homo sapiens
ggaacgaggaggtggagaattgagagcacgatgcatacacaggtgtttctgagtagtaattagatcgctgtgaaggaaaaagcacacctttgagttttcacctgtgaacactatagcgctgagagagacagtctgaaagcagaggaagacatcgatcagtaacaccaagagacaccaaagttgaaagttttgttttctttccctctgttttatttttcccccgtgtgtccctactatggtcagaaagcctgttgtgtccaccatctccaaaggaggttacctgcagggaaatgttaacgggaggctgccttccctgggcaacaaggagccacctgggcaggagaaagtgcagctgaagaggaaagtcactttactgaggggagtctccattatcattggcaccatcattggagcaggaatcttcatctctcctaagggcgtgctccagaacacgggcagcgtgggcatgtctctgaccatctggacggtgtgtggggtcctgtcactatttggagctttgtcttatgctgaattgggaacaactataaagaaatctggaggtcattacacatatattttggaagtctttggtccattaccagcttttgtacgagtctgggtggaactcctcataatacgccctgcagctactgctgtgatatccctggcatttggacgctacattctggaaccattttttattcaatgtgaaatccctgaacttgcgatcaagctcattacagctgtgggcataactgtagtgatggtcctaaatagcatgagtgtcagctggagcgcccggatccagattttcttaaccttttgcaagctcacagcaattctgataattatagtccctggagttatgcagctaattaaaggtcaaacgcagaactttaaagacgcgttttcaggaagagattcaagtattacgcggttgccactggctttttattatggaatgtatgcatatgctggctggttttacctcaactttgttactgaagaagtagaaaaccctgaaaaaaccattccccttgcaatatgtatatccatggccattgtcaccattggctatgtgctgacaaatgtggcctactttacgaccattaatgctgaggagctgctgctttcaaatgcagtggcagtgaccttttctgagcggctactgggaaatttctcattagcagttccgatctttgttgccctctcctgctttggctccatgaacggtggtgtgtttgctgtctccaggttattctatgttgcgtctcgagagggtcaccttccagaaatcctctccatgattcatgtccgcaagcacactcctctaccagctgttattgttttgcaccctttgacaatgataatgctcttctctggagacctcgacagtcttttgaatttcctcagttttgccaggtggctttttattgggctggcagttgctgggctgatttatcttcgatacaaatgcccagatatgcatcgtcctttcaaggtgccactgttcatcccagctttgttttccttcacatgcctcttcatggttgccctttccctctattcggacccatttagtacagggattggcttcgtcatcactctgactggagtccctgcgtattatctctttattatatgggacaagaaacccaggtggtttagaataatgtcagagaaaataaccagaacattacaaataatactggaagttgtaccagaagaagataagttatgaactaatggacttgagatcttggcaatctgcccaaggggagacacaaaatagggatttttacttcattttctgaaagtctagagaattacaactttggtgataaaaaaaaaaaaaaaaaaa

SEQ ID NO: 31 - DNA, 5717 bp, Homo sapiens
attaagctttagcgtaacagattcttttcaatcaagtactggaatcagttgtccaggtggagtaatacagaaaagctaaggtctagaaaccaggggaccattttagatacaaagcagaattgcggaattgccagattataacttgaggtttgttcgggggattttttttaaccatctaaaataaatgtatataagatggactgagtcttctaaagagattctaaaactatattcttacttaagtctgaacaggaattaagaataactcaaagtgaatttgatcgtcaagcagagattaccagacttctgctagagggaatcagcagtacacatgcccatcaccttcgctgtctgaatgactttgtagaagcccagatgacttactatgcacagtgttaccagtatatgttggacctccagaaacaactgggaagttttccatccaattatcttagtaacaacaatcagacttctgtgacacctgtaccatcagttttaccaaatgcgattggttcttctgccatggcttcaacaagtggcctagtaatcacctctccttccaacctcagtgaccttaaggagtgtagtggcagcagaaaggccagggttctctatgattatgatgcagcaaacagtactgaattatcacttctggcagatgaggtgatcactgtgttcagtgttgttggaatggattcagactggctaatgggggaaaggggaaaccagaagggcaaggtgccaattacctacttagaactgctcaattaagtaggtggactatggaaaggttgcccatcatgactttgtatttatatacaattaactctaaataaagcaggttaagtatcttccatgttaatgtgttaagagactgaaaataccagccatcagaaactggcctttctgccaataaagttgcatggtaaatatttcattacagaatttatgttagagctttcatgccaagaatgttttcttacaaaattctctttttattgaggtttcactaataagcagcttctacttttgagcctcaacttaaagcagaactgttttctactggatttttcattaacagcaagctttttcttttatgtaaaataaatctattgtgaattgatatcagcgactcatttattaggtataaataatagccaaagaataaaattaaaatttattttaaactttcggtcttaaaaagagctgtaggatataaacctcttttgtgaaaagtagaattttctgaatgctttcatagacaaaaacgcatttaaactatgtttacctggttttccaacagaaatcaaatgattttaatattatgttttgatgggttattttcagagttgtttggttttttaaacactactgaatggtttcttttaaatttaagaacaactagttcttgaaaagcaataccgtatttctctgataaatttgtagttaaggttctagaaaatctaggacaaatttacttcattaaacataaagtttttaagattattcagttggcacaatttaatgcataattgggattggatccatttactgtactgtggtacagtaaagagaatgtgttcttattgaacagcagatttgtatacaaatacggaataatgcaactacattataaattgtatacgaacaaaataaattgggtcactctgagcttactattaaaacattgaaaatttattaatgaacacaggctatcttgatgaggatctctgcttatgaaacacatactaatgaaattattagtgacacattggaagctagaaaattgctgttggggccattgctataaatcattgtttccatgttaagacttctgttctaattcattcattcaacaaacatttgttgagggccagatactgtgctggtcaactggggatactgtcctgaacaatatgcacacagttcttgcccctgcagagcttaaagaccattaaaggatacagaaaattaagcaattatcctatagtaggattcgtggtgtgatggggaaaatacaaggtactgtatttgggagtcatgtaactccagttttgggagtgagagagggtctggggaagaactgttccagataaaaagatgtgtaaccaagatagcatagcacattctgacaactaaagcaatttactctaacttaagcatgaagtacaaaagtatagttcatttattgagggaatgttaagctattaaaatgatactttttggtacttttaaaaaaatgaatacttaaacaccgttttaaaattttgtgttaagagctcctaataagaacttggtaaacatgttgacaatttaactcacagtctaaactttaaaagtagtagttacccttttatttctgtgccatgagacaaattcttctgcagttttatagttgtacaagatgttttgactcactctcaattgccatattcttaaagaaaccctgaaaagctgctcaagctggtcagttttctgtaaaaccaagtaaatgaaattttctctcccctcagaaaggaagttctacagcctagagtaccatctattgtgttttataagtccagatttaggctttgaaagatcataccaaaacttcagatcgacttaaacagcaactatgaattaggtttatgggaaatgtagtaatacaggggaaagaatatcggtaatggagtgaaatggtcctgggttcaaatccagtcttcctcacatattgtgctctttaagcttcaaatgagatgtataactgccttttccttaccagtaaaatgaggacaataattatgacaccatagggtggttgtgaggattagcaaatgttatcttgtatttcaggtgcctttcagggaaaggcttggcacatagtaaacacatcctgtaaatatcagtttccccttgttagcccctgtagcatcctgacctaccaagtctataggccttgcatatcactgtgcaccagagatacctcttttacatctgggctctgttttctctctatcaatcctatcctccaccctctttaaatcagaccccaggtttaaccttcccacagtcagtataaatcatttttcagaactttcagctttccatcaagtgaaagttgattttagttacccagtaatgtacagaaaccttcaataatgttaagcttcaaaggcttctggtacgtttgtctaccacagaaccaccacaatatatatgcttgttcttaggtttattgctttttattttaatggggtttggttgtttgggttttattttggttttggcttattttaaagtcaagtttagtttttactcaggtaaaggcctgaagtttcttgggcgtggaagaaaaagcttgggaagcctattaattcatggtgcagttcagaattgtttaaataagctctgtgccactgagcttaatctgaaagtatagtgacatgtgaaggatgcacatatgaatgaaaaactaaaataattgtaggctcttctataaatgaaaaaaaaagtgattggattgtgtctacctttttcctcaaagtaatctaacctaaacggtcatggtgttaaaactttttatggtgctaatcagaaaaattgatgttgcaagaaatgaggtctcaaaaatgggaatgtgcctcctcactctgcgtcacatgggaaataaatcctgaggccaggatcaccagtggggtagagtcatcttcatagtctcctgttatcctccccctgaacaaagaacaaagtgagactgggaagctagtgttggggaaacatttctgggataaactgtggagtggagaagacaatggagggcaaggcaaaaacccacagacttgtttacccatagaggccccactcacctccatgctgacagaattccagaaaaattccttccctatctcccaaacacctgaaattctgaaatattgccctactatttagcactttaagcttcagtgaggtgctgtaatggagagatagcttcatagtttagcctatagccaactttgcctcaagacctccagataagatgaagtggcttttacctcatgtgagtctcaaacgctggagagagagttccacaaccacccctgccctttctcccatattacgctcattagaaagtctactcagggctgggtgccgtggctcatgcctgtaatcccagcactttggaggctgaggcgggtggatcatctgaggtcaggagttcgagaccagcctggccaacatggggaaaccctgtctctactgaaaatataaaaattagccgggcatggtggcgtgcacctgtaattccagctactcgggaggctgaggcaggagaatcacttgaaccccagaggcagaggctacagtgagccaagattgcaccactgcactccaacctgggtgatagaataagactcttgtctcaaggaaagaaaaaatgtctactcagtagagcagtgattggcaaagtgtgagaccccagaccggcaatattggcatctcctggagacttgtttaaaatgctgattactattttcaagaactttctaccttcatttttacttatttttttgttttcaagggctcatggaatcagtcttccatgtgacagctttttaaatattttaagacaaaaactgagtcttctaatcttaattgtgttctagcagtagtcattgtaattatagttatttttataatttatttgtttagtgtatatctgtcactctagaatgtaggctccctgagataaaaactataattcttttgatggcagttacattcccaactcttagcacaagatctaggacatagtatgaactcaataaatttttgttgaatgaaagaaaaatgcaaatttataagccttttcagagacctactgaatcaaactctgagagtggagcccagcaatctgttgtaaaagctgtttgagtaatactgttgcactctaagcttgagaaccactgcaatagaactaagagaacattcatttcaccttcaggcctattctctgacatcacttgaaaaatcctctctgccttctgtaacccttaaccaacaacagtgccctgtccatgtaggggaaacttctgggctgtattacaagtgggtaggaaggtataaggatatcatagtgggaagtattgcttagaatgccagtacttgtttgctgtggaaggtttctaggaatggattgcttagtctaaagtaagcactaccaccatccacgttttcactcaacacagtgccttttaattggtgactaacatcaaaacaccttgacaaaccgttaaaacagtatcagaaaccatgtgtacatccctgtgcctcttagattgctaagttctgctctcattcttacttcaaaggacactttttaaagaattgttaatgcttttttataatacaagtcatagccctgttggcaaaaagaaaaaagattcagtgagaaagaaaaatcactgataattccatcatccagggagaaccactgttatttaagtatatggccttccagacctttctgtgcatttatagatatttttaatgggatcaaagtgtacatactgttttgtaactttttttcactcaacaataccatgactgtcttgctgtgtcaagtatatttctacatctcttaatggctgcatgatattccatcatatgtgccacattttattaaactactgttcaatttttaggtttccaactttcattaataaagtgctttaaag

SEQ ID NO: 32 - DNA, 1195 bp, Homo sapiens
cgcgccggagcgggaccgacgggaccgagcgagcgaccgacgcgccacccgccgacgcctcagccgcttggggcccgcacggaccctctacttcagtgtagaatgagccaaggagactcaaacccagcagctattccgcatgcagcagaagatattcaaggagatgaccgatggatgtctcagcacaacagatttgttttggactgtaaagacaaagagcctgatgtactgttcgtgggagactccatggtgcagttaatgcagcaatatgagatatggcgagagcttttttccccacttcatgcactgaattttggaattgggggagatacaacaagacatgttttgtggagactaaagaatggagaactggagaatattaagcctaaggtcattgttgtctgggtaggaacaaataaccacgaaaatacagcagaagaagtagcaggtgggatcgaggccattgtacaacttatcaacacaaggcagccacaggccaaaatcattgtattgggtttgttacctcgaggtgagaaacccaatcctttgaggcaaaagaacgccaaggtgaaccaactcctcaaggtttcgctgccgaagcttgccaacgtgcagctcctggataccgacgggggttttgtgcactcggacggtgccatctcctgccacgacatgtttgattttctgcatctgacaggagggggctatgcaaagatctgcaaacccctgcatgaactgatcatgcagttgttggaggaaacacctgaggagaaacaaaccaccattgcctgactggctcttatcagtgttaatagcatctcagcttcctcagatcagttctatcactggcactacagaatccttctctttcttaaggcactttgcattgtagaatgttcctggatgttcatatctagtgtttgaaggggaggagggatttaaactggtcctgtacatagaaggtttgtttgacagaggagaaaaattagccaaggaagattgttgtttaaattcatttgaaaccagaaggggactttttagttgtatgtgtaacacattcattgaattattatcactgttttcttgggacaacatcaagcctaaatactgaacaatatgaagattcttttcttggcctttctgtggattatgtcatatataataattatcagaatcattctacttggctttttcc

SEQ ID NO: 33 - DNA, 1693 bp, Homo sapiens
gaagggctcgaagatggccggttggcagagctacgtggataacctgatgtgcgatggctgctgccaggaggccgccattgtcggctactgcgacgccaaatacgtctgggcagccacggccgggggcgtctttcagagcattacgccaatagaaatagatatgattgtaggaaaagaccgggaaggtttctttaccaacggtttgactcttggcgcgaagaaatgctcagtgatcagagatagtctatacgtcgatggtgactgcacaatggacatccggacaaagagtcaaggtggggagccaacatacaatgtggctgtcggcagagctggtagagcattggttatagtcatgggaaaggaaggtgtccacggaggcacacttaacaagaaagcatatgaactcgctttatacctgaggaggtctgatgtgtaagcagcctctccccatctacctagcaactgtcttcatcaacaaccctaattatggtcacaatgctaccaaactgtagatggtagctaatttttctttacctattttctaatgtcatgattcctgtttgcccaatggatcatttgtatgttaaccactgtatgtaaccaacccttatctggcaacataattgcagcacaataatgatttgcatgataccttgaaattggggggagggggcatgccaagttgggcatcactttgtcttagcaattaatgggatattgattactaaaataagttaatattaagcaaggtgccggttgtacaatctctgatcagtgtcttttcagcactttgagcatttacttggctcatttagtcttccttttgtagcgcatggttgggaggaaaaagtgcatgcatcattccttcactcttctctttttcccgcccccccctcccttcgcacataggcatttggtttgcttccatctttttttatgcagtgcctgtttttttttaaccaattaaaatcccttttgttgatgagctattgagagctgcagtagtttgcttttagtattgttgttgcacttgagcagagacaaacctttattcatagtgtctacaggacatatgaagagtgcaatggcaaaacaagagcaaaaagcacttcctcccatgaccttacagtaaccatactgattgaatccccagggacattccatcattgcaatagctcagatttttcttcctttttctttgcacaccagctctactctttagtaaaattgtaaaaggctgccattatggacattaggtatcccaacataaccatctggagtgtgtccagtttgttcttcataggaccaatttttatttgcagcttgagtttttatatgaagttgcattattgtggacttggctgtccttgaatttttttcatatgtattctgtgccatactattgttaaaatgaactgttgctattgtgagatggattttaactgacctattaagggtttctttcgaatggcactactttagggacattctagtatttgcttctattgtttgggccttgtggataatgtacagatttaaaaacaaatcttgttgctgatttgtccatttctttccctgcactttgttacatctgggatacagtctaactcatctgatttaatatgcatttaaaaaaatgccataactattaaacaccttgtttacagacagatgaaataaatttattccaacc

SEQ ID NO: 34 - DNA, 3407 bp, Homo sapiens
cgcgcgtctccgccgcccgcgtgacttctgcctgcgctccttctctgaacgctcacttccgaggagacgccgacgatgaagacaccgtggaagattcttctgggactgctgggtgctgctgcgcttgtcaccatcatcaccgtgcccgtggttctgctgaacaaaggcacagatgatgctacagctgacagtcgcaaaacttacactctaactgattacttaaaaaatacttatagactgaagttatactccttaagatggatttcagatcatgaatatctctacaaacaagaaaataatatcttggtattcaatgctgaatatggaaacagctcagttttcttggagaacagtacatttgatgagtttggacattctatcaatgattattcaatatctcctgatgggcagtttattctcttagaatacaactacgtgaagcaatggaggcattcctacacagcttcatatgacatttatgatttaaataaaaggcagctgattacagaagagaggattccaaacaacacacagtgggtcacatggtcaccagtgggtcataaattggcatatgtttggaacaatgacatttatgttaaaattgaaccaaatttaccaagttacagaatcacatggacggggaaagaagatataatatataatggaataactgactgggtttatgaagaggaagtcttcagtgcctactctgctctgtggtggtctccaaacggcacttttttagcatatgcccaatttaacgacacagaagtcccacttattgaatactccttctactctgatgagtcactgcagtacccaaagactgtacgggttccatatccaaaggcaggagctgtgaatccaactgtaaagttctttgttgtaaatacagactctctcagctcagtcaccaatgcaacttccatacaaatcactgctcctgcttctatgttgataggggatcactacttgtgtgatgtgacatgggcaacacaagaaagaatttctttgcagtggctcaggaggattcagaactattcggtcatggatatttgtgactatgatgaatccagtggaagatggaactgcttagtggcacggcaacacattgaaatgagtactactggctgggttggaagatttaggccttcagaacctcattttacccttgatggtaatagcttctacaagatcatcagcaatgaagaaggttacagacacatttgctatttccaaatagataaaaaagactgcacatttattacaaaaggcacctgggaagtcatcgggatagaagctctaaccagtgattatctatactacattagtaatgaatataaaggaatgccaggaggaaggaatctttataaaatccaacttattgactatacaaaagtgacatgcctcagttgtgagctgaatccggaaaggtgtcagtactattctgtgtcattcagtaaagaggcgaagtattatcagctgagatgttccggtcctggtctgcccctctatactctacacagcagcgtgaatgataaagggctgagagtcctggaagacaattcagctttggataaaatgctgcagaatgtccagatgccctccaaaaaactggacttcattattttgaatgaaacaaaattttggtatcagatgatcttgcctcctcattttgataaatccaagaaatatcctctactattagatgtgtatgcaggcccatgtagtcaaaaagcagacactgtcttcagactgaactgggccacttaccttgcaagcacagaaaacattatagtagctagctttgatggcagaggaagtggttaccaaggagataagatcatgcatgcaatcaacagaagactgggaacatttgaagttgaagatcaaattgaagcagccagacaattttcaaaaatgggatttgtggacaacaaacgaattgcaatttggggctggtcatatggagggtacgtaacctcaatggtcctgggatcgggaagtggcgtgttcaagtgtggaatagccgtggcgcctgtatcccggtgggagtactatgactcagtgtacacagaacgttacatgggtctcccaactccagaagacaaccttgaccattacagaaattcaacagtcatgagcagagctgaaaattttaaacaagttgagtacctccttattcatggaacagcagatgataacgttcactttcagcagtcagctcagatctccaaagccctggtcgatgttggagtggatttccaggcaatgtggtatactgatgaagaccatggaatagctagcagcacagcacaccaacatatatatacccacatgagccacttcataaaacaatgtttctctttaccttagcacctcaaaataccatgccatttaaagcttattaaaactcatttttgttttcattatctcaaaactgcactgtcaagatgatgatgatctttaaaatacacactcaaatcaagaaacttaaggttacctttgttcccaaatttcatacctatcatcttaagtagggacttctgtcttcacaacagattattaccttacagaagtttgaattatccggtcgggttttattgtttaaaatcatttctgcatcagctgctgaaacaacaaataggaattgtttttatggaggctttgcatagattccctgagcaggattttaatctttttctaactggactggttcaaatgttgttctcttctttaaagggatggcaagatgtgggcagtgatgtcactagggcagggacaggataagagggattagggagagaagatagcagggcatggctgggaacccaagtccaagcataccaacacgagcaggctactgtcagctcccctcggagaagagctgttcaccacgagactggcacagttttctgagaaagactattcaaacagtctcaggaaatcaaatatcgaaagcactgacttctaagtaaaccacagcagttgaaagactccaaagaaatgtaagggaaactgccagcaacgcagcccccaggtgccagttatggctataggtgctacaaaaacacagcaagggtgatgggaaagcattgtaaatgtgcttttaaaaaaaaatactgatgttcctagtgaaagaggcagcttgaaactgagatgtgaacacatcagcttgccctgttaaaagatgaaaatatttgtatcacaaatcttaacttgaaggagtccttgcatcaatttttcttatttcatttctttgagtgtcttaattaaaagaatattttaacttccttggactcattttaaaaaatggaacataaaatacaatgttatgtattattattcccattctacatactatggaatttctcccagtcatttaataaatgtgccttcattttttc

SEQ ID NO: 35 - DNA, 2085 bp, Homo sapiens
gactctggccgcctgttttttttgcagcgcgtgcgcgcaccgcgggctccgggctcagaagtgcggacgcccggctcccgcgtggacgccatggtgctgtgcccggtgattgggaagctgctgcacaagcgcgtggtgctggccagcgcctccccacgccgtcaggagatcctcagcaacgcgggtctcaggtttgaggtggtcccctccaagtttaaagagaagctggacaaagcctccttcgctactccgtatgggtacgccatggagaccgccaagcagaaggccctggaggtggccaaccggctataccagaaagacctgcgggcccccgacgtggtcattggagcggacacgatcgtgacggtcggggggctgattctggagaagccggtggacaagcaggacgcctacaggatgctgtcccggttgagtgggagagaacacagcgtgttcacaggtgtcgcgatcgtccactgctccagcaaagaccatcagctggacaccagggtctcggaattctacgaggaaacgaaggtgaagttctcggagctgtccgaggagctgctctgggaatacgtccacagcggggagcccatggacaaagctggcggctacggtatccaggccctgggcggcatgctggtggagtccgtacacggggactttctgaacgtggtgggattcccgctgaaccacttctgcaagcagctggtgaagctctactacccgccccgtccggaggacctgcggcggagtgtcaagcacgactccatcccggccgcggacaccttcgaagacctcagtgacgtggaggggggcggctcggagcccactcagagggacgcgggcagccgcgatgagaaggccgaggcgggagaggcgggacaggccacggcagaggctgagtgtcacaggactcgggagaccctgcctccgttcccgacacgcctcctggagctgattgagggctttatgctatccaagggcctgctcaccgcttgcaaactgaaggtgttcgatttattaaaagatgaagcaccccagaaggctgcggatattgccagcaaagtggacgcctctgcgtgtggaatggagaggcttctggacatctgtgctgccatggggctcctggagaagacagagcaaggttacagtaacacagagacagcgaacgtctacctggcatcggatggcgaatactctctgcacggcttcatcatgcacaataatgacctcacatggaacctctttacatacctggagtttgccatccgagagggaacaaaccagcaccacagggcgttggggaagaaggcggaagatctgttccaggatgcgtactaccagagcccggagacgcggctgaggttcatgcgggccatgcacggcatgacgaagctgactgcgtgccaggtggccacggccttcaatctgtcccgcttctcctccgcctgcgacgtgggaggctgcacgggtgcactggcccgagagctggcccgtgagtaccctcgtatgcaggtgactgtgtttgacctcccagacattatcgagctggccgcccacttccaaccccccggaccgcaggcagtgcagatccacttcgcagcaggtgactttttcagggaccccctccccagcgctgagctgtacgtcctgtgccggatcctgcatgactggccagacgacaaagtccacaagttactcagcaaggtcgccgagagctgcaagccaggggccggcctgctgctggtggagacgctcctggatgaggagaagagggtggcgcagcgcgccctgatgcagtcactgaacatgctggtgcagactgaaggcaaggagcggagcctgggcgagtatcagtgcttgctggagctgcacggcttccaccaggtgcaggtggtgcacttggggggtgtcctggatgccatcttgccaccaaagtggccccctgaagcccaggcagcatgttcattatagggatgtcctcccccaggctgcaggtggaccgcccggtccccaagtaccataggacagtcacataggagcgtgtagtcgtgactgaataaagaaagcaaaagcctg

SEQ ID NO: 36 - DNA, 647 bp, Homo sapiens
  misc_feature (438)..(438): n is a, c, g, or t
tttttgaccatccaataattgggtgggatcccatctgtgcccgacaagggcccacagaggcctgggaggggagctaagggctggggttccggtggcatttgggatgttcaagacagtctgtgcacagcctccctgggagggtctgcagtcacctcggcccacggtcccggggtgactgggctccagcagcccttccttccttccttgcttccgtccttccttcctcctccttccgtctgcacctccttcctgcatccggcacctccatgtcctgagcttgtgctgcgtcaggagagcacacacttgcagctcatgcagccggggccactctcatcaggagggttcagcttccgcagcttgtgctgccggatctcacgcaccaacgtgtagaaggcatcctccactctctgccgggtcttggccgatgtctcgatgtangggatgccgtagcttcgggcgaggtcctgagcctgccgagattccacagtgcgtgcagccaggtcacactttgtccccaccagcaccatgggcacgtcatccgagtccttcaccccgttgatctgctccctggtactggtgatgtcctcaaaagactggtgttgtgatggaaacaccacaggaagccctccctgtcccatgactggtcc

SEQ ID NO: 37 - DNA, 3422 bp, Homo sapiens
ccacgcgtccggcagcctgtatgagcaagtgccgaggcctacggtgagcgccggagccggagaggcagctatatgtctttggctttcaagatcttctttccacaaaccctccgtgcactcagccgaaaagaactgtgcctattccgaaaacatcactggcgtgatgtaagacaattcagccagtggtcagaaacagatctgcttcatggacatcccctcttcctgagaagaaagcctgttctatcattccagggaagccatctaagatcacgtgccacctaccttgttttcttgccagggttgcatgtgggactctgcagtggcccctgtgagatggctgagcaacggttctgtgtggactatgccaagcgtggcacagctggctgcaaaaaatgcaaggaaaagattgtgaagggcgtatgccgaattggcaaagtggtgcccaatcccttctcagagtctgggggtgatatgaaagagtggtaccacattaaatgcatgtttgagaaactagagcgggcccgggccaccacaaaaaaaatcgaggacctcacagagctggaaggctgggaagagctggaagataatgagaaggaacagataacccagcacattgcagatctgtcttctaaggcagcaggtacaccaaagaagaaagctgttgtccaggctaagttgacaaccactggccaggtgacttctccagtgaaaggcgcctcatttgtcaccagtaccaatccccggaaattttctggcttttcagccaagcccaacaactctggggaagccccctcgagccccacccctaagagaagtctgtcttcaagcaaatgtgaccccaggcataaggactgtctgctacgggagtttcgaaagttatgcgccatggtggccgataatcctagctacaacacgaagacccagatcatccaggacttccttcggaaaggctcagcaggagatggtttccacggtgatgtgtacctaacagtgaagctgctgctgccaggagtcattaagactgtttacaacttgaacgataagcagattgtgaagcttttcagtcgcatttttaactgcaacccagatgatatggcacgggacctagagcagggtgacgtgtcagagacaatcagagtcttctttgagcagagcaagtctttccccccagctgccaagagcctccttaccatccaggaagtggatgagttccttctgcggctgtccaagctcaccaaggaggatgagcagcaacaggccctacaggacattgcctccaggtgtacagccaatgaccttaaatgcatcatcaggttgatcaaacatgatctgaagatgaactcaggtgcaaaacatgtgttagacgcccttgaccccaatgcctatgaagccttcaaagcctcgcgcaacctgcaggatgtggtggagcgggtccttcacaacgcgcaggaggtggagaaggagccgggccagagacgagctctgagcgtccaggcctcgctgatgacacctgtgcagcccatgttggcggaggcctgcaagtccgttgagtatgcaatgaagaaatgtcccaatggcatgttctctgagatcaagtacgatggagagcgagtccaggtgcataagaatggagaccacttcagctacttcagccgcagtctcaagcccgtccttcctcacaaggtggcccactttaaggactacattccccaggcttttcctgggggccacagcatgatcttggattctgaagtgcttctgattgacaacaagacaggcaaaccactgccctttgggactctgggagtacacaagaaagcagccttccaggatgctaatgtctgcctgtttgtttttgattgtatctactttaatgatgtcagcttgatggacagacctctgtgtgagcggcggaagtttcttcatgacaacatggttgaaattccaaaccggatcatgttctcagaaatgaagcgagtcacaaaagctttggacttggctgacatgataacccgggtgatccaggagggattggaggggctggtgctgaaggatgtgaagggtacatatgagcctgggaagcggcactggctgaaagtgaagaaagactatttgaacgagggggccatggccgacacagctgacctggtggtccttggagccttctatgggcaagggagcaaaggcggcatgatgtcaatcttcctcatgggctgctacgaccctggcagccagaagtggtgcacagtcaccaagtgtgcaggaggccatgatgatgccacgcttgcccgcctgcagaatgaactagacatggtgaagatcagcaaggaccccagcaaaatacccagctggttgaaggtcaacaagatctactatcctgacttcatcgtcccagacccaaagaaagctgccgtgtgggagatcacaggggctgaattctccaaatcggaggctcatacagctgacgggatctccatccgattccctcgctgcacccgaatccgagatgataaggactggaaatctgccactaaccttccccaactcaaggaactgtaccagttgtccaaggagaaggcagacttcactgtagtggctggagatgaggggagctccactacagggggtagcagtgaagagaataagggtccctcagggtctgctgtgtcccgcaaggcccccagcaagccctcagccagtaccaagaaagcagaagggaagctgagtaactccaacagcaaagatggcaacatgcagactgcaaagccttccgctatgaaggtgggggagaagctggccacaaagtcttctccagtgaaagtaggggagaagcggaaagctgctgatgagacgctgtgccaaacaaaggtattgctggacatcttcactggggtgcggctttacttgccaccctccacaccagacttcagccgtctcagacgctactttgtggcattcgacggggacctggtacaggaatttgatatgacttcagccacgcacgtgctgggtagcagggacaagaaccctgcggcccagcaggtctccccagagtggatttgggcatgtatccggaaacggagactggtagctccctgctaggtttgctgtcttccctctccctcaggccatactctcctttaccatactattggactggactcaggctggaggcagatagacacagtatagggggaatgggcttgcttctcccaaacccaccagttctccactgtctcttctggaccaggaattagttgctgtgggtgccacagctgaagtcagtttgtcttgctggtttaaatagatctttcagagctgggtgctgggtttgccatctttttgttttctttgaaaagcagcttagttaccctttttataaataaaatatcttgcagttaaaaaaaaaaaaaaaaaaaaaa

SEQ ID NO: 38 - DNA, 3781 bp, Homo sapiens
gccatggagaacgcgcacaccaagacggtggaggaggtgctgggccacttcggcgtcaacgagagtacggggctgagcctggaacaggtcaagaagcttaaggagagatggggctccaacgagttaccggctgaagaaggaaaaaccttgctggaacttgtgattgagcagtttgaagacttgctagttaggattttattactggcagcatgtatatcttttgttttggcttggtttgaagaaggtgaagaaacaattacagcctttgtagaaccttttgtaattttactcatattagtagccaatgcaattgtgggtgtatggcaggaaagaaatgctgaaaatgccatcgaagcccttaaggaatatgagcctgaaatgggcaaagtgtatcgacaggacagaaagagtgtgcagcggattaaagctaaagacatagttcctggtgatattgtagaaattgctgttggtgacaaagttcctgctgatataaggttaacttccatcaaatctaccacactaagagttgaccagtcaattctcacaggtgaatctgtctctgtcatcaagcacactgatcccgtccctgacccacgagctgtcaaccaagataaaaagaacatgctgttttctggtacaaacattgctgctgggaaagctatgggagtggtggtagcaactggagttaacaccgaaattggcaagatccgggatgaaatggtggcaacagaacaggagagaacaccccttcagcaaaaactagatgaatttggggaacagctttccaaagtcatctcccttatttgcattgcagtctggatcataaatattgggcacttcaatgacccggttcatggagggtcctggatcagaggtgctatttactactttaaaattgcagtggccctggctgtagcagccattcctgaaggtctgcctgcagtcatcaccacctgcctggctcttggaactcgcagaatggcaaagaaaaatgccattgttcgaagcctcccgtctgtggaaacccttggttgtacttctgttatctgctcagacaagactggtacacttacaacaaaccagatgtcagtctgcaggatgttcattctggacagagtggaaggtgatacttgttcccttaatgagtttaccataactggatcaacttatgcacctattggagaagtgcataaagatgataaaccagtgaattgtcaccagtatgatggtctggtagaattagcaacaatttgtgctctttgtaatgactctgctttggattacaatgaggcaaagggtgtgtatgaaaaagttggagaagctacagagactgctctcacttgcctagtagagaagatgaatgtatttgataccgaattgaagggtctttctaaaatagaacgtgcaaatgcctgcaactcagtcattaaacagctgatgaaaaaggaattcactctagagttttcacgtgacagaaagtcaatgtcggtttactgtacaccaaataaaccaagcaggacatcaatgagcaagatgtttgtgaagggtgctcctgaaggtgtcattgacaggtgcacccacattcgagttggaagtactaaggttcctatgacctctggagtcaaacagaagatcatgtctgtcattcgagagtggggtagtggcagcgacacactgcgatgcctggccctggccactcatgacaacccactgagaagagaagaaatgcaccttgaggactctgccaactttattaaatatgagaccaatctgaccttcgttggctgcgtgggcatgctggatcctccgagaatcgaggtggcctcctccgtgaagctgtgccggcaagcaggcatccgggtcatcatgatcactggggacaacaagggcactgctgtggccatctgtcgccgcatcggcatcttcgggcaggatgaggacgtgacgtcaaaagctttcacaggccgggagtttgatgaactcaacccctccgcccagcgagacgcctgcctgaacgcccgctgttttgctcgagttgaaccctcccacaagtctaaaatcgtagaatttcttcagtcttttgatgagattacagctatgactggcgatggcgtgaacgatgctcctgctctgaagaaagccgagattggcattgctatgggctctggcactgcggtggctaaaaccgcctctgagatggtcctggcggatgacaacttctccaccattgtggctgccgttgaggaggggcgggcaatctacaacaacatgaaacagttcatccgctacctcatctcgtccaacgtcggggaagttgtctgtattttcctgacagcagcccttggatttcccgaggctttgattcctgttcagctgctctgggtcaatctggtgacagatggcctgcctgccactgcactggggttcaaccctcctgatctggacatcatgaataaacctccccggaacccaaaggaaccattgatcagcgggtggctctttttccgttacttggctattggctgttacgtcggcgctgctaccgtgggtgctgctgcatggtggttcattgctgctgacggtggtccaagagtgtccttctaccagctgagtcatttcctacagtgtaaagaggacaacccggactttgaaggcgtggattgtgcaatctttgaatccccatacccgatgacaatggcgctctctgttctagtaactatagaaatgtgtaacgccctcaacagcttgtccgaaaaccagtccttgctgaggatgcccccctgggagaacatctggctcgtgggctccatctgcctgtccatgtcactccacttcctgatcctctatgtcgaacccttgccactcatcttccagatcacaccgctgaacgtgacccagtggctgatggtgctgaaaatctccttgcccgtgattctcatggatgagacgctcaagtttgtggcccgcaactacctggaacctgcaatactggagtaaccgcttcctaaaccattttgcagaaatgtaagggtgttcggttgcgtgcatgtgcgtttttagcaacacatctaccaaccctgtgcatgactgatgttggggaaaaagaaaagtaaaaaacttcccaactcactttgtgttatgtggaggaaatgtgtattaccaatggggttgttagcttttaaatcaaaatactgattacagatgtacaatttagcttaatcagaaagcctctccagagaagtttggtttctttgctgcaagaggaatgaggctctgtaaccttatctaagaacttggaagccgtcagccaagtcgccacatttctctgcaaaatgtcatagcttatataaatgtacagtattcaattgtaatgcatgcttcggttgtaagtagccagatccctctccagtgacattggaacatgctactttttaattggccctgtacagtttgcttatttataaattcattaaaaacactacaggtgttgaatggttaaaatgtaggcctccagttcattttcagttattttctgagtgtgcagacagctatttcgcactgtattaaatgtaacttatttaatgaaatcagaagcagtagacagatgttggtgcaatacaaatattgtgatgcatttatcttaataaaatgctaaatgtcaatttatcactgcgcatgtttgactttagactgtaaatagagatcagtttgtttctttctgtgctggtaacaatgagcgtcgcacagacatggtttcaggtaaataaatctattctatgat

SEQ ID NO: 39 - DNA, 1233 bp, Homo sapiens
atggtccgtccgcgccgtgccccgtaccgctccggcgccgggggccccctcgggggtcgcggccgccctccgcggcccctcgtggtgcgcgccgtccgctcgcgctcctggcctgccagcccccgaggcccgcagcctccgcggatccgggcccgctcggcccctcccatggaaggtgctcgggtcttcggggcactgggtcccatcggtccctcctcacctgggctcaccctcgggggtctggccgtgagcgagcaccggctcagcaacaagctgctggcttggagcggcaagcgcagaccctactctgactccactgcaaagctgaagcggaccctgccctgccaagcctacgtgaaccaaggcgagaacctggagaccgaccagtggccgcagaagctgatcatgcagctgatccctcagcagctgctgaccaccctgggccccctgttccggaactcccagttggcacagttccacttcaccaacagagactgcgactcgctcaaggggctctgccgcatcatgggcaacggcttcgcgggctgcatgctgttcccccacatctccccctgtgaggtgcgcgtgctcatgctcctgtactcgtccaagaagaagatcttcatgggcctcatcccctacgaccagagcggcttcgtcagtgccatccggcaggtcatcaccacccgcaagcaggcagtgggacctggtggtgtcaactcaggcccagtccagatcgtcaacaacaagtttctggcatggagtggtgtcatggagtggcaggagcccaggcctgagcccaacagtcggtccaagaggtggctgccatcccacgtctacgtgaaccagggggagatcctgaggaccgagcagtggccaaggaagctgtacatgcagctcatcccgcagcagctgctgaccaccctagtgccgctgttccggaactcgcgcctggtccagttccacttcaccaaggacctggagacactgaagagcctgtgccggatcatggacaatggcttcgccggctgcgtgcacttttcctacaaagcatcgtgtgagatccgcgtgcttatgctcctgtactcttcagagaagaaaatcttcattggcctcatcccccatgaccagggcaactttgtcaacggcatccggcgtgtcattgccaaccagcagcaggtcctgcagcggaacctggagcaggagcaacagcaacgagggatgggggggtag

SEQ ID NO: 40 - DNA, 5887 bp, Homo sapiens
gtgaggagggccggcggcggggcggacccctggcggtcctcctggctggggtccgcgcgctcgcggcagctccccgtggaggtcactgtccgtgccagtccctcccgctgtcccgccctctcccgctgccgccgccgccgccgccgcgcccgcctcagcgcccccactccgcgcttgggagcgaggagccgccagcgcccccgccccgccgccgccgcagcgccctcaggccgccattcgccaccgaaactttccagcgcccgcgctctctccgggactcggcggcggcggggcgggggcggcccgggggcggcgcgcggctgctccggggcgccgggccctcttcggccgccgcacggccgggactcggaggctgccggctggagggaggttcggagcgcggccgggcgcgcggcgccgccacaagttgcgctgctcgcgacgagatttccgtgagggtggaagaaaatcataccatatcagatgcctcgcagagcaccaggcccaccgtgaaaggctggtccctgcagacggcttcccatttttatgaccggatgctgggaagcctgctggtccacaggtccatacatgaagtcaccataaggagccctggcctccttgcagaaacatcgaggtgacatgtagcatgaccgagctcgctggcgcctcttcatcgtgctgccaccgccctgcaggaagaggggccatgcagtcagtcttgcaccactttcaacgtttgcgagggagagagggtggttcccacttcatcaacacctcatcgccgcgaggtgaggctaagatgagcataaccagtgacgaggtgaactttctggtgtatcggtatctccaggagtcaggtttttcccactcggctttcacgtttgggattgagagccacatcagccagtccaacatcaatgggacgctagtgccaccggccgccctcatctccattctccagaagggcctgcagtatgtagaggccgagatcagtatcaacgaggatggcacagtgttcgacggccgccccatagagtccctgtcactgatagacgccgtgatgcccgacgtggtgcagacgcggcagcaggcattccgagagaagctcgctcagcagcaagccagtgcggcggcggcggcggctgcggccacggcagcagcgacagcagccaccacgacctcagccggcgtttcccaccaaaatccatcgaagaacagagaggccacggtgaatggggaagagaacagagcacattcagtcaataatcacgcgaagccaatggaaatagatggagaggttgagattccatccagcaaagccacagtccttcggggccatgagtctgaggtgttcatttgtgcctggaatcctgtcagtgatttgctagcctccggatctggagactcaactgcaaggatatggaacctgaatgagaatagcaacgggggctccacccagctcgtgttgaggcactgtatacgagaggggggccatgacgtcccgagtaacaaagacgtcacctcactggactggaataccaatggaacactcttggctacgggttcatatgacggttttgcaagaatatggacggaagatggtaacctggccagcaccttaggccaacataaaggccccatctttgccttgaaatggaaccgaaaggggaattacattttgagtgctggtgtagacaaaacaacaataatttgggatgcccacacaggagaagccaaacagcagtttccttttcattcagcccctgcccttgatgtggactggcagaacaacacgacctttgcctcctgtagcacagacatgtgtatccatgtgtgcaggctcggctgtgaccgcccagtcaaaaccttccagggacacacaaacgaggtcaacgccatcaaatgggatccgtctggaatgttgctggcatcctgctcggatgacatgacattgaagatctggagcatgaaacaggaggtgtgcatccatgatcttcaggctcacaataaagagatctacaccatcaagtggagccccactgggcccgccaccagcaacccaaactccaacatcatgttggcaagtgcttcgtttgattctacggtgcgactgtgggacatagaacgaggcgtctgcacccacacgctcacgaagcatcaggagcctgtctatagcgtagctttcagccctgatgggaagtacttggccagtggatccttcgacaagtgcgtccatatctggaatactcagagtggaaatcttgtccacagctaccgaggcactggcggcatcttcgaggtgtgctggaacgcccgaggagacaaagtgggtgccagcgcgtccgacggctctgtgtgtgttttggatctgcggaagtaaccacaaaatattatcgaaaaaagaaaagaattctaatgaccagccgtgaatgtgtagggttgcagctctattctccaaaactgtaggaacttgacttgcgttagagtgtactctgaaaccaactcgtctctggccgcaggagtctatatgttttcgtaatcttcatcaagaagtttttaaaaggcaagcaaaaacagaagcaaatcatatcaaacggggatagaatggtttccactgaggacattcagcctgggaaggaggaagtcaccagctcgaggcgtgtggattggtttccacccggaacaggctctgtgatggctgaatggaaagaaacgtaaaaagctgtgccaaaaaaaaagcaaaatgctgtgataaaccaaacagggaagggggaaaaaccctcctccttgggatttttttttttttgttttccctaacaatttggacactacaattgctctcacaaaggaggttcaaagaccagtttgtaccgatgaaacgcgcaactttgtaatcccaacactttctattttctagaatcttctttgttcattgggtggtttttcagtcggctggaattctatcttctgggggccttccgtctgagatggaagctgtcttgggcttgttgtctcttccttctgttgctccctgcccctccccctgtctttccactctgtctggtgagctctgctttttcagtgcaccatcaagagatgcagccccgtggacatgaagacacaatctcccacggacagctttcccccttccgccctctcccaccctctcctccccttgcgctcgcgctcgcgctcgctttctcactggcgtgctctctttctctctctctctccctctgtacctttctcatagttgcttcagatcttaggtctcaagggcactttggcgcgtagtaagtgctttatgtaagaaggcagggcaggggggcctttttacaggagaaaaaaaaatgacttataagagaaagagcctggagtatttttggaaaaaaaaataatatttttatgttaaaacaattttaaaatcttaaaatggccatcagacatagagagctttgtgtgattcatgttttaaaaagaaccgaagaagccacaggcagggcctgagggagcccctggctttcccctcagcctcaggaaaggtggtcaggaaaactctggctggacaagggtcagtcttcggggtcagcagcgagattgctctgcagccagtgagggaggtccccgccatgccggctggaagaagaacctcgcatcttttggtgtgtatgcaccttggcagccagcaggaaagcagcgaagagccgcgcgccctctggcctcaagggagcattggcagaaccataaggtactgcagaagccgtcgaaaccgactgctcggctggattaggcgtgttggctacatctttcccacaaccgtataacgaccgatggtcatttctccaagagcaggcttggcgagtccttgcagagctgacatagaggcgcccgcatgtcacttagtctaacgctgacagaaatgaatgcagaaggaagattttcagtcctgaacgtgaattatagaggtagaacgtcgctaataatttctgccatcttcataatttctttgtctcacagaagactaggagaaagatcttttttaaataatctttttgctgtttttaaaaaattaaacaaggctttgtgttcctagaagagcttcatttcagtgaatctggtgacctccatctgcttgctgtcataacccgacacggacttatttttgtcattagcaagggggaaaaggccaaaggacaagggcctcttctcccattggttttcctgtgggcagaagggctgaggaagatggcccagcccgtgggggctgctgggtcaccagcagcgggtagggtgcaatctggtgtgtgttccagcagtgagacggtgttattgtgaaggtggcattcatctgcggagccaaaacccagccatcggggaagggtcagggcttctgtggaacttggaacgtgccaggaccacctgcaaaagccagggtgcgttggatcattctcagatcattgattgggcctccacttgggtatgtgaattattcatgtcccagaagaccaaaaagtgctctggttctgagatgagtattttattcgtgttctgtttccgaaacacttagcaaagaaggtcacagtgatgtggagtcgccgcacccatctttgaagatagccagtgtccctggatgaggtatgatttcccgtcccaaggactctgtgaagtttagagtacagtttgttggggtccaaaagacaccatctctaccccacccaaataaaaatgcactcatctctgtagaacatctgctgtcaaaggccagcctgtcgttagggcatggcttatgcttgacaaaccagtaacaactgtgggatggcgatggtgggatgtgtcgcaagcaattcactagacaatcttcacatgaatgtcggtagccagggtctctcccgagggatggctttagtcttgatgaatgtgaaccatgtcggaattgttaggtagaaacctgggctgggaggcctcggaccccaggctccatccctggcttccccagcctgcggccgcaagcaaaaccaagcgcgagatgcagctagcacccttcatatccatccccgttctcagcgggacaacaccatggacagccgttttcagagcctccagcatttgcacaccactactcaccctctctgctgctggcatgttggtagagtcatccctgtaatcaagaaatggcctgtggaatgttattgttcaacgttgtttacagctcttaaaacatggtgaggaatgcctaagtcttagtgaccaaacgtgaccttgaaagcagacatagcatgacagaccttcctagagtgtttggtcgggttcacagtgaccgagagtcaggtccagcacacacctgggaaagggatgctgccccaagggggaccaaaagggccggacgttacagggtgaaaccctctgacccctcgcgacaccgtaggacttgacttttgtttagtctttctaagaaatagatcatggagccaagtgaagtgcactttgtcaaatgtaagggtctgctttgttcttgttgcttttctgttttttaaccttttgttccgccatttaaaaaaagaaaaaaaaaaagcttatgtttcttgtcaaatgcagaaatgttccttccgccactcactgaagttttgcattctggcttgtgcagtttttattgtctgtgtcagacgtacagccagacatgttctctattggcatttttccgattctgttcagatgacagcgaccgccttttcattccccccgccacctgtactcaccctcacgctctttgaagaaaaaaaaaaaaaatcaccttgtgtgttgtagctcatttgtttcaagagagaatcaacagatcatattcagtgtcttgaataaattgctctattttgatattaaaaaaaaaaaa

SEQ ID NO: 41 - DNA, 290 bp, Homo sapiens
cgcaatcgagcaccgttgactcacaagatgaacaaaatggtgacgtcagaagaacagatgaagttgccatccaccaagaaggcagagccgccgacttgggcacaactaaagagctgacgcagttagctacaaaatatctagagaacacaaaggtgacacaaaccccagagagtatgctgcttgcagcttgatgattgtatcaatggtggtaagtctccctatgcctgcaggagcagctgcagctaactatacctactgggcctatgtgcctttcccgcccttaattcggg

SEQ ID NO: 42 - DNA, 1116 bp, Homo sapiens
atggatcgaggtgccaagtcctgccctgccaacttcttggcagctgccgacgacaaactcagtgggttccagggggacttcctgtggcccatactggtggttgagttcctggtggccgtggccagcaatggcctggccctgtaccgcttcagcatccggaagcagcgcccatggcaccccgccgtggtcttctctgtccagctggcagtcagcgacctgctctgcgctctgacgctgcccccgctggccgcctacctctatccccccaagcactggcgctatggggaggccgcgtgccgcctggagcgcttcctcttcacctgcaacctgctgggcagcgtcatcttcatcacctgcatcagcctcaaccgctacctgggcatcgtgcaccccttcttcgcccgaagccacctgcgacccaagcacgcctgggccgtgagcgctgccggctgggtcctggccgccctgctggccatgcccacactcagcttctcccacctgaagaggccgcagcagggggcgggcaactgcagcgtggccaggcccgaggcctgcatcaagtgtctggggacagcagaccacgggctggcggcctacagagcgtatagcctggtgctggcggggttgggctgcggcctgccgctgctgctcacgctggcagcctacggcgccctcgggcgggccgtgctacgcagcccaggcatgactgtggccgagaagctgcgtgtggcagcgttggtggccagtggtgtggccctctacgccagctcctatgtgccctaccacatcatgcgggtgctcaacgtggatgctcggcggcgctggagcacccgctgcccgagctttgcagacatagcccaggccacagcagccctggagctggggccctacgtgggctaccaggtgatgcggggcctcatgcccctggccttctgtgtccaccctctactctacatggccgcagtgcccagcctgggctgctgctgccgacactgccccggctacagggacagctggaacccagaggacgccaagagcactggccaagccctgcccctcaatgccacagccgcccctaaaccgtcagagccccagtcccgtgagctgagccaatga

SEQ ID NO: 43 - DNA, 3647 bp, Homo sapiens
agactggggtgggggaggggttcaggcctgttccccgcggctgcggcagcaccagggccggccgccaccgcctctagaacgcggaggaggtgggtcctgggaagcgggatgtccatcgctccagcttggtggtgaatgctgaggagagtcactgttgctgcagtctgtgccacccggaggaagttgtgtgaggccgggcgggacgtcgcggcgctctggggaatcgaaacgcggggtcggtgcgaagactctgctgctgccagaccctttcctattctggccatgcctggaaggaacaaggcgaagtctacctgcagctgccctgacctgcagcccaatggacaggatctgggcgagaacagccgggttgcccgtctaggagcggatgaatctgaggaagagggacggagggggtctctcagtaatgctggggaccctgagatcgtcaagtctcccagcgaccccaagcaataccgatacatcaaattacagaatggcctacaggcacttctgatttcagacctaagtaatatggaaggtaaaacaggaaatacaacagatgatgaagaagaagaggaggtggaggaagaagaagaagatgatgatgaagattctggagctgaaatagaagatgacgatgaagagggttttgatgatgaagatgagtttgatgatgaacatgatgatgatcttgatactgaggataatgaattggaagaattagaagagagagcagaagctagaaaaaaaactactgaaaaacagtctgcagcggctctttgtgttggagttgggagtttcgctgatccagatgacctgccggggctggcacactttttggagcacatggtattcatgggtagtttgaaatatccagatgagaatggatttgatgccttcctgaagaagcatgggggtagtgataatgcctcaactgattgtgaacgcactgtctttcagtttgatgtccagaggaagtacttcaaggaagctcttgatagatgggcgcagttcttcatccacccactaatgatcagagatgcaattgaccgtgaagttgaagctgttgatagtgaatatcaacttgcaaggccttctgatgcaaacagaaaggaaatgttgtttggaagccttgctagacctggccatcctatgggaaaatttttttggggaaatgctgagacgctcaagcatgagccaagaaagaataatattgatacacatgctagattgagagaattctggatgcgttactactcttctcattacatgactttagtggttcaatccaaagaaacactggatactttggaaaagtgggtgactgaaatcttctctcagataccaaacaatgggttacccagaccaaactttggccatttaacggatccatttgacacaccagcatttaacaaactttatagagttgttccaatcagaaaaattcatgctctgaccatcacatgggcacttcctcctcaacagcaacattacagggtgaagccacttcattatatatcctggctggttggacatgaaggcaaaggcagcattctttctttccttaggaaaaaatgctgggctcttgcactgtttggtggaaatggtgagacaggatttgagcaaaattctacttattcagtgttcagcatttctattacattgactgatgagggttatgaacatttttatgaggttgcttacactgtctttctgtatttaaaaatgctgcagaagctaggcccagaaaaaagaatttttgaagagattcggaaaattgaggataatgaatttcattaccaagaacagacagatccagttgagtatgtggaaaacatgtgtgagaacatgcagctgtacccattgcaggacattctcactggagatcagcttctttttgaatacaagccagaagtcattggtgaagccttgaatcagctagttcctcaaaaagcaaatcttgttttactgtctggtgctaatgagggaaaatgtgacctcaaggagaaatggtttggaactcaatatagtatagaagatattgaaaactcttgggctgaactgtggaatagtaatttcgaattaaatccagatcttcatcttccagctgaaaacaagtacatagccacggactttacgttgaaggctttcgattgcccggaaacagaatacccagttaaaattgtgaatactccacaaggttgcctgtggtataagaaagacaacaaattcaaaatccccaaagcatatatacgtttccatctaatttcaccgttgatacagaaatctgcagcaaatgtggtcctctttgatatctttgtcaatatccttacgcataaccttgcggaaccagcttatgaagcagatgtggcacagctggagtataaactggcagctggagaacatggtttaattattcgagtgaaaggatttaaccacaaactacctctactgtttcagctcattattgactacttagctgagttcaattccacaccagctgtctttacaatgataactgagcagttgaagaagacctactttaacatcctcatcaagcctgagactttggccaaagatgtacggcttttaatcttggaatatgcccgttggtctatgattgacaagtaccaggctttgatggacggcctttcccttgagtctctgctgagcttcgtcaaagaattcaaatcccagctctttgtggagggcctggtacaagggaatgtcacaagcacagaatctatggatttcctgaaatatgttgttgacaaactaaacttcaagcctctggagcaggagatgcctgtgcagttccaggtggtagagctgcccagtggccaccatctatgcaaagtgaaagctctgaacaagggtgatgccaactctgaagtcactgtgtactaccagtcaggtaccaggagtctaagagaatatacgcttatggagctgcttgtgatgcacatggaagaaccttgttttgacttccttcgaaccaagcagacccttgggtaccatgtctaccctacctgtaggaacacatccgggattctaggattttctgtcactgtggggactcaggcaaccaaatacaattctgaagttgttgataagaagatagaagagtttctttctagctttgaggagaagattgagaacctcactgaagaggcattcaacacccaggtcacagctctcatcaagctgaaggagtgtgaggatacccaccttggggaggaggtggataggaactggaatgaagtggttacacagcagtacctctttgaccgccttgcccacgagattgaagcactgaagtcattctcaaaatcagacctggtcaactggttcaaggctcatagagggccaggaagtaaaatgctcagcgttcatgttgttgggtatgggaagtatgaactggaagaggatggatccccttctagtgaggattcaaattcttcttgtgaagtgatgcagctgacctacctgccaacctctcctctgctggcagattgtatcatccccattactgatatcagggctttcacaacaacactcaaccttctcccctaccataaaatagtcaaataaataaactgcagtcacgttggcctgaaaaaaaaaaaaaaaaaaaaaaaaaaaaaaaa

SEQ ID NO: 44 - DNA, 556 bp, Homo sapiens
ggggtgggcgggctgtcccagggctcaccgccattcatgaaggggtggagcctgcctgcctgcgggcctttataagagccactggctggctttccgggcaggcctcctggcagcacctgctgcagtgaacaggccggctgaggtgcacgggagcccgccggcctctctctgcccgtgtccgtccgtgaaattccagacagggctgcccgcgatggccctcccgaaaccttcagacggcaccctccccgcggaagtccagggacggggacagcgaaggagactcgtttggaccccgagccaaagcaaggccctacaagcctgctttgagcggaacccgtacccgggcatcaccaccagagaacggctggcccaggccatcggcattccggagcccagggtccagattctgtttcagaatgagaggtcatgccagctgaggcagcactggcattaatctcagtcctggcctgggagatgcggcccacaagaaggcaggtgaaagcggaccaccgtcaccggatcccagaccgccctgcccctccgagcctttgagtag

SEQ ID NO: 45 - DNA, 2392 bp, Homo sapiens
agcgggccgaggagccgggcgcaatggagcggaagaggtgggagtgcccggcgctcccgcagggctgggagagggaagaagtgcccagaaggtcggggctgtcggccggccacagggatgtcttttactatagcccgagcgggaagaagttccgcagcaagccgcagctggcgcgctacctgggcggctccatggacctgagcaccttcgacttccgcacgggcaagatgctgatgagcaagatgaacaagagccgccagcgcgtgcgctacgactcctccaaccaggtcaagggcaagcccgacctgaacacggcgctgcccgtgcgccagacggcgtccatcttcaagcagccggtgaccaagattaccaaccaccccagcaacaaggtcaagagcgacccgcagaaggcggtggaccagccgcgccagctcttctgggagaagaagctgagcggcctgaacgccttcgacattgctgaggagctggtcaagaccatggacctccccaagggcctgcagggggtgggacctggctgcacggatgagacgctgctgtcggccatcgccagcgccctgcacactagcaccatgcccatcacgggacagctctcggccgccgtggagaagaaccccggcgtatggctcaacaccacgcagcccctgtgcaaagccttcatggtgaccgacgaggacatcaggaagcaggaagagctggtgcagcaggtgcggaagcggctggaggaggcgctgatggccgacatgctggcgcacgtggaggagctggcccgtgacggggaggcgccgctggacaaggcctgcgctgaggacgacgacgaggaagacgaggaggaggaggaggaggagcccgacccggacccggagatggagcacgtctagggcagaggccctgccgagagcccgtgctgcctgctggagccgcctgcagacgcggtcctcggccccacgtgaaccaggctcggcggcgaagcccagccttggagacacccaggaggaaggccgtgctcctggctccctcctcggcccgtccccacttcccggggcctcggggcacacagctggggctgcccccacccgaaagaccctccacgctcgtcctctacagagtccggcttcgggaagtgccgggtgctcctgggccctgcctggctccctacgacctttgggctcgaggccagctcctccccatgcccgctgtcccagctccttgagactggagagcagccagcaggtgcccggcagctcggcgccacggcttgctgacagctgggagggtttctcggtctggaggcgtagttttgaaactcacatcacccactgtgcagcgtgaggacgggactctggtctgctgtggggggcatgcaggacggcgccactctctgccctgccatgcggctggtggtgccacagagcctcaccgtgcctgagtggcgtgcccagggaggccgctctccttcagtaaatgtaacacagtcgaggcacgtcatcgggcagccttccctgtgtgccaacgccagccttcgcttctgaaaaccaaactccagccgctgccagtcgggacttggtcgcccggcgctgccagaatgctccactgccagccggcccccctgcctcggtttcccttctgtttagtggcgacacaggcacccagctttggggtggtgctgacgctcccaggggtgccaggagccactgggacagggtgaggctcccagacgctcctcgaggtgcccagctctccagggagcttctggcccaaggcgttcttgagggatctgctccttaaccccccagtgccttggcgagggcaggttccaagccacagacgcctgccccgagtggactttgcggccagtccctgggtgccttcctgggccctgcttgcccagtgagggttcctaacgggtgggttcawtggcctggcccvagcgagcccccacctgcattgaccttaggcccatagagagggcctgtcccggtgctgccccagccaaggatctggtcgctgccccagggggactgatgggcaagagtcgcccctgtggctggactgtgaccatccctgatggggcctgaccgcgggagctgaggaagcgccgctccaccgtctgccctccaaggacccgcatggaggcagtgggctggcagcttcctgctgctccctgtcagagtcaaagcacaaatcctcaggacgggctcaagggccagggcagccgagggaagctccaggtggggaccacgtcttcctgaggttggtgcccactggctgggaccctttgcagtggggtggcctcccctctgtctgcctggtggagggagccgtgggcgtggggacgtgactgaataaagccaccatgggtggatgtgcttgg

SEQ ID NO: 46 - DNA, 924 bp, Homo sapiens
agttcagagagaagtctacagtccttgtctcggggtgtcttcccccttccccttcctcatcttccccgccagcctccactcccttctgatttctcgtcttctttttccgtagaaatcaacggaacccagatttgccccaacgacctagtggcgttccatgacttctcctcggacctggagaacgtgccacacctgcgctacctgcggctggatggaaactacttgaagccgcccatcccgctggacctcatgatgtgcttccgcctcctgcagtccgtggtcatctaggccctactccgccaccggatctgctctgaccgcacttgaaggctggggcccaggacctgtgccggccattcgttttctctctctccctttctttctcccagctttgcctccttatgccacctcgaggcagggaaaagccatctatacttctgcagcctaaggagcgagacttcaaggactcagtttggttccacccagttgaaagacacccagtgcacacccaaactcctggccttctgtggtttccctttgctccagaaacacagatgtgtctaaagacttggtgtccccttctctctcctcccccacccgccactcctgggtacatctgggccgtggactatctgatcttggtcctggccgagaaacagcccggagtaaggttcagaaagtccccctggggactcctccatcttcggcagctctggctcaaagaggccgagaaacccagttctcctgggccaaggatcccttctggcaaagctgctgctccgccgcttggttccccggcaccagacatcgccctggccctgctggcccgggtatcggaaggaggagcgagggaatgacggaggtagggtgcagggtaagggctcccaggtcttcatctggccagcaggacacagggatctaagg

SEQ ID NO: 47 - DNA, 684 bp, Homo sapiens
cctttttgtcccagttgtcattattttcgaattcctaaaaaagctgaaggtgtcggagctgaaagaggagctcaagaagcgacgcctttctgacaagggtctcaaggccgagctcatggagcgactccaggctgcgctggacgacgaggaggccgggggccgccccgccatggagcccgggaacggcagcctagacctgggcggggattccgctgggcgctcgggagcaggcctcgagcaggaggccgcggccggcggcgatgaagaggaggaggaagaggaagaggaggaggaaggaatctccgctctggacggcgaccagatggagctaggagaggagaacggggccgcgggggcggccgactcgggcccgatggaggaggaggaggccgcctcggaagacgagaacggcgacgatcagggtttccaggaaggggaagatgagctcggggacgaagaggaaggcgcgggcgacgagaacgggcacggggagcagcagcctcaaccgccggcgacgcagcagcaacagccccaacagcagcgcggggccgccaaggaggccgcggggaagagcagcggccccacctcgctgttcgcggtgacggtggcgtgaagcctgtgaaagtttcagctccccgagttggtggaaaacgctaaactggcagattagatttttaaataaag

SEQ ID NO: 48 - DNA, 1119 bp, Homo sapiens
acaactactcagactgggaaaatacagattggttcaaagaaaccaaaaaccagagtgtccctcttagctgctgcagagagactgccagcaattgtaatggcagcctggcccacccttccgacctctatgctgaggggtgtgaggctctagttgtgaagaagctacaagaaatcatgatgcatgtgatctgggccgcactggcatttgagctattcagctgctgggcatgctgtgtgcttgcatcgtgttgtgcagaaggagtagagatcctgcttacgagctcctcatcactggcggaacctatgcatagttgacaactcaagcctgagctttttggtcttgttctgatttggaaggtgaattgagcaggtctgctgctgttggcctctggagttcatttagttaaagcacatgtacactggtgttggacagagcagcttggcttttcatgtgcccacctacttacctactacctgcgactttctttttccttgttctagctgactcttcatgcccctaagattttaagtacgatggtgaacgcttctaatttcagaaccaattgcgagtcatgtagtgtggtagaattaaaggaggacacgagcctgcttctgttacctccaagtggtaacaggactgatgccgaaatgtcaccaggtcctttcagtcttcacagtggagaactcttggccaaaggtttttggggggaggaggaggaaaccagctttctggttaaggttaacaccagatggtgcccctcattggtgtccttttaaaaaatatttactgtagtccaataagatagcagctgtacaaaatgactaaaatagattgtaggatcatatggcgtatatcttggttcatcttgaaaatcagagactgagctttgaaactagtggtttttaatcaaagttggctttataggaggagtataatgtatgcactactgttttaaaagaattagtgtgagtgtgtttttgtatgaatgagcccattcatggtaagtcttaagcttgttggaaataatgtacccatgtagactagcaaaatagtatgtagatgtgatctcagttgtaaatagaaaaatctaattcaataaactctgtatcagcccccaac

SEQ ID NO: 49 - DNA, 1685 bp, Homo sapiens
gagtagctgctttcggtccgccggacacaccggacagatagacgtgcggacggcccaccaccccagcccgccaactagtcagcctgcgcctggcgcctcccctctccaggtccatccgccatgtggcccctgtggcgcctcgtgtctctgctggccctgagccaggccctgccctttgagcagagaggcttctgggacttcaccctggacgatgggccattcatgatgaacgatgaggaagcttcgggcgctgacacctcaggcgtcctggacccggactctgtcacacccacctacagcgccatgtgtcctttcggctgccactgccacctgcgggtggttcagtgctccgacctgggtctgaagtctgtgcccaaagagatctcccctgacaccacgctgctggacctgcagaacaacgacatctccgagctccgcaaggatgacttcaagggtctccagcacctctacgccctcgtcctggtgaacaacaagatctccaagatccatgagaaggccttcagcccactgcggaagctgcagaagctctacatctccaagaaccacctggtggagatcccgcccaacctacccagctccctggtggagctccgcatccacgacaaccgcatccgcaaggtgcccaagggagtgttcagcgggctccggaacatgaactgcatcgagatgggcgggaacccactggagaacagtggctttgaacctggagccttcgatggcctgaagctcaactacctgcgcatctcagaggccaagctgactggcatccccaaagacctccctgagaccctgaatgaactccacctagaccacaacaaaatccaggccatcgaactggaggacctgcttcgctactccaagctgtacaggctgggcctaggccacaaccagatcaggatgatcgagaacgggagcctgagcttcctgcccaccctccgggagctccacttggacaacaacaagttggccagggtgccctcagggctcccagacctcaagctcctccaggtggtctatctgcactccaacaacatcaccaaagtgggtgtcaacgacttctgtcccatgggcttcggggtgaagcgggcctactacaacggcatcagcctcttcaacaaccccgtgccctactgggaggtgcagccggccactttccgctgcgtcactgaccgcctggccatccagtttggcaactacaaaaagtagaggcagctgcagccaccgcggggcctcagtgggggtctctggggaacacagccagacatcctgatggggaggcagagccaggaagctaagccagggcccagctgcgtccaacccagccccccacctcaggtccctgaccccagctcgatgccccatcaccgcctctccctggctcccaagggtgcaggtgggcgcaaggcccggcccccatcacatgttcccttggcctcagagctgcccctgctctcccaccacagccacccagaggcaccccatgaagcttttttctcgttcactcccaaacccaagtgtccaaagctccagtcctaggagaacagtccctgggtcagcagccaggaggcggtccataagaatggggacagtgggctctgccagggctgccgcacctgtccagaacaacatgttctgttcctcctcctcatgcatttccagccttg

SEQ ID NO: 50 - DNA, 1536 bp, Homo sapiens
gtttatgactatttacgtcccattgctctgaatctgtgtgcagacaaagtttcttctgttcgttggatttcctacaagttggtcagcgagatggtgaagaagctgcatgcggcaacaccaccaacgttcggagtggacctcatcaatgagcttgtggagaactttggcagatgtcccaagtggtctggtcggcaagcctttgtctttgtctgccagactgtcattgaggatgactgccttcccatggaccagtttgctgtgcatctcatgccgcatctgctaaccttagcaaatgacagggttcctaacgtgcgagtgctgcttgcaaagacattaagacaaactctactagaaaaagactatttcttggcctctgccagctgccaccaggaggctgtggagcagaccatcatggctcttcagatggaccgtgacagcgatgtcaagtattttgcaagcatccaccctgccagtaccaaaatctccgaagatgccatgagcacagcgtcctcaacctactagaaggcttgaatctcggtgtctttcctgcttccatgagagccgaggttcagtgggcattcgccacgcatgtgacctgggatagctttcgggggaggagagaccttcctctcctgcggacttcattgcaggtgcaagttgcctacacccaataccagggatttcaagagtcaagagaaagtacagtaaacactattatcttatcttgactttaaggggaaataatttctcagaggattataattgtcaccgaagccttaaatccttctgtcttcctgactgaatgaaacttgaattggcagagcattttccttatggaagggatgagattcccagagacctgcattgctttctcctggttttatttaacaatcgacaaatgaaattcttacagcctgaaggcagacgtgtgcccagatgtgaaagagaccttcagtatcagccctaactcttctctcccaggaaggacttgctgggctctgtggccagctgtccagcccagccctgtgtgtgaatcgtttgtgacgtgtgcaaatgggaaaggaggggtttttacatctcctaaaggacctgatgccaacacaagtaggattgacttaaactcttaagcgcagcatattgctgtacacatttacagaatggttgctgagtgtctgtgtctgattttttcatgctggtcatgacctgaaggaaatttattagacgtataatgtatgtctggtgtttttaacttgatcatgatcagctctgaggtgcaacttcttcacatactgtacatacctgtgaccactcttgggagtgctgcagtctttaatcatgctgtttaaactgttgtggcacaagttctcttgtccaaataaaatttattaataagatctatagagagagatatatacacttttgattgttttctagatgtctaccaataaatgcaatttgtgacctgtattaatgatttaaagtggggaaactagattaaaatatttgtcttttaactaaaaaaaaaaaaaaaaaaaa

SEQ ID NO: 51 - DNA, 1613 bp, Homo sapiens
gttgacggctgcgactccattttgtaggccgcttatttgtgtgcatccacggcgattcttcccgcagagttgtgaagcgaaaggcttacaattaaaaggaagaaaaaaaaataaagataattcgggagtacaattgacaaagcgtgtgggtcgctcagcctccagcagtaactgctgatctccagttcttggagggttccggtgagaagaacgcccctactgcggtactgaggaagcggcaggaggagatgcggcccctggacatagacgaggtggaagcgcctgaggaagtggaggtgctggagcccgaggaggatttcgagcagttcctgctcccggtcatcaacgagatgcgcgaggacatcgcgtctcttatacgcgagcacgggcgggcgtacctgcggaccaggagcaagctgtgggagatggacaatatgcttatccagatcaaaacgcaggtggaggcctcggaggagagcgccctcaatcacgtgcagcacccgagtggcgaacgacgagagagtgtcggagttgtgcgagaaggctgaggagaaagccaaggagattgcgaagatggcagagatgctggtcgagctcgtctggcgaatagagagaagcgagtcttcttgaaggaggagatcggtggttcacagctgaggactgtagtcaactggtaaggatgaactgacaccttgaggaaactgaaacagcttgtcattttctctgttttgtttttgtatgttttttacccccatgtaacagtctcccttatggtcagtgattgatgacctcgatatggatttagattatcaaatgtgtttggttttggaaatataacttttgtcaaagaaatactctcagaagagaaatggggcttaattaagttgtttttgtggtcacgtttattcttgttacttcgctgtgtttttgaaatgttgggcatggcctcgtattttgctgttacctttgtgacctgattgttttttggaacacgtcaagacgtgggatcagaatcttccaactttagaggtgcaatggaagacactacgctacttggttgagcctggtgaagaatgtattaatgagactgctttgcataaaactgggaagaaagagaagacagttggagatggaagatggttttgtatatattttggaactttagttcctctgtgagacgaaagaggagagctatgttttgtgtcacattgtctgatatatattgtgtaacctgtcaggtgagttgatttagacaacatagctgaccttttatgacaaggcagtttgaatagggactattgtaataccctcacacattataggggcacagagaatggcatggaagagacagtctacagagagctttaagaggccggagaaaggaaaagacattatcagggcctggaaagtctcttccagttcatcagggtagtagacctgtcagattggaggtcaaagtcaaaagtataataagtgttaatttgccttgaaaaacaaagacctaaaaagccttttttaagaaataaattttttgttcacatgaccaaagcccctcctgtgtgtgttaataaaagaatcttatcaaacaaaaaaaaaaaaaaaaaaaaaaaaaa

SEQ ID NO: 52 - DNA, 2380 bp, Homo sapiens
ctgtgtgtcaaaccggccgcagcgcgaggccggcgcgcggggtcggtggcggtggcggcggcgagagcgaggcttgggcccaggcgcaggcccaggccaggcaggagcggccgcagcgggggcggcagctccagaggcgccggcccagcggccctgcaggcccggagcggcagccgcgggcgccgggggacccagggggcgcggcgatcaccccggcgcgcacccgccgcccctcccccccgccacgggcggccgcgcaacttgcggccaaactttccccccggcctcccgcgctcggatggcggcccgctgagttggccgcagcccccgggcgagcggcggccaggccagaggacgccccctgcgcggctcgggccgggccatggccgcgcgcccccgccggggccccagggcggcgggacggagtccatctgggcccccggcccgcgcctctagcgtgcccctcccggccccgggcccggccccgcgcacggtgggaaagttggcctggaaccggcccgaccagttccgcccgggcgcgaggaccggccgcagaagttgctgcaaaacttttttggggggtgcagcccgtgccccccgcgcgccggggccgaatgcgcgccgcgtagggtcccccgggccgagaggggtgcccggaggaagagcgcggtgggggcgccccggccccgctgccctggggctatggccatggtgaccggcggctggggcggccccggcggcgacacgaacggcgtggacaaggcgggcggctacccgcgcgcggccgaggacgactcggcctcgccccccggtgccgccagcgacgccgagccgggcgacgaggagcggccggggctgcaggtggactgcgtggtgtgcggggacaagtcgagcggcaagcattacggtgtcttcacctgcgagggctgcaagagctttttcaagcgaacgatccgccgcaacctcagctacacctgccggtccaaccgtgactgccagatcgaccagcaccaccggaaccagtgccagtactgccgtctcaagaagtgcttccgggtgggcatgaggaaggaggcggtgcagcgcggccgcatcccgcactcgctgcctggtgccgtggccgcctcctcgggcagccccccgggctcggcgctggcggcagtggcgagcggcggagacctcttcccggggcagccggtgtccgaactgatcgcgcagctgctgcgcgctgagccctaccctgcggcggccggacgcttcggcgcagggggcggcgcggcgggcgcggtgctgggcatcgacaacgtgtgcgagctggcggcgcggctgctcttcagcaccgtggagtgggcgcgccacggcttcttccccgagctgccggtggccgaccaggtggcgctgctgcgcatgagctggagcgagctcttcgtgctgaacgcggcgcaggcggcgctgcccctgcacacggcgccgctactggccgccgccggcctccacgccgcgcctatggccgccgagcgcgccgtggctttcatggaccaggtgcgcgccttccaggagcaggtggacaagctgggccgcctgcaggtcgactcggccgagtatggctgcctcaaggccatcgcgctcttcacgcccgacgcctgtggcctctcagacccggcccacgttgagagcctgcaggagaaggcgcaggtggccctcaccgagtatgtgcgggcgcagtacccgtcccagccccagcgcttcgggcgcctgctgctgcggctccccgccctgcgcgcggtccctgcctccctcatctcccagctgttcttcatgcgcctggtggggaagacgcccattgagacactgatcagagacatgctgctgtcggggagtaccttcaactggccctacggctcgggccagtgaccatgacggggccacgtgtgctgtggccaggcctgcagacagacctcaagggacagggaatgctgaggcctcgaggggcctcccggggcccaggactctggcttctctcctcagacttctattttttaaagactgtgaaatgtttgtcttttctgttttttaaatgatcatgaaaccaaaaagagactgatcatccaggcctcagcctcatcctccccaggacccctgtccaggatggagggtccaatcctaggacagccttgttcctcagcacccctagcatgaacttgtgggatggtggggttggcttccctggcatgatggacaaaggcctggcgtcggccagaggggctgctccagtgggcaggggtagctagcgtgtgccaggcagatcctctggacacgtaacctatgtcagacactacatgatgactcaaggccaataataaagacatttcctacctgc

SEQ ID NO: 53 - DNA, 3410 bp, Homo sapiens
gcaccaggcgcccagtggagccgtttgggagaattgcctgcgccacgcagcggggccggacaggcggtaaggatctgattaggctttcgaacttgagtttgactgatgtcttctgtgtggtgtccgctaaatcccacagcatataggatcagtcgcattggttataaggtttgcttctggctgggtgcggtggctcatgcctgtaatccaacattgggaggccaaggcaggcggaccacctgaagtcgggagcttgagtccagccactgtctgggtactgccagccatcgggcccaggtctctggggttgtcttaccgcagtgagtaccacgcggtactacagagaccggctgcccgtgtgcccggcaggtggagccgccgcatcagcggcctcggggaatggaagcggagaacgcgggcagctattcccttcagcaagctcaagctttttatacgtttccatttcaacaactgatggctgaagctcctaatatggcagttgtgaatgaacagcaaatgccagaagaagttccagccccagctcctgctcaggaaccagtgcaagaggctccaaaaggaagaaaaagaaaacccagaacaacagaaccaaaacaaccagtggaacccaaaaaacctgttgagtcaaaaaaatctggcaagtctgcaaaaccaaaagaaaaacaagaaaaaattacagacacatttaaagtaaaaagaaaagtagaccgttttaatggtgtttcagaagctgaacttctgaccaagactctccccgatattttgaccttcaatctggacattgtcattattggcataaacccgggactaatggctgcttacaaagggcatcattaccctggacctggaaaccatttttggaagtgtttgtttatgtcagggctcagtgaggtccagctgaaccatatggatgatcacactctaccagggaagtatggtattggatttaccaacatggtggaaaggaccacgcccggcagcaaagatctctccagtaaagaatttcgtgaaggaggacgtattctagtacagaaattacagaaatatcagccacgaatagcagtgtttaatggaaaatgtatttatgaaatttttagtaaagaagtttttggagtaaaggttaagaacttggaatttgggcttcagccccataagattccagacacagaaactctctgctatgttatgccatcatccagtgcaagatgtgctcagtttcctcgagcccaagacaaagttcattactacataaaactgaaggacttaagagatcagttgaaaggcattgaacgaaatatggacgttcaagaggtgcaatatacatttgacctacagcttgcccaagaggatgcaaagaagatggctgttaaggaagaaaaatatgatccaggttatgaggcagcatatggtggtgcttacggagaaaatccatgcagcagtgaaccttgtggcttctcttcaaatgggctaattgagagcgtggagttaagaggagaatcagctttcagtggcattcctaatgggcagtggatgacccagtcatttacagaccaaattccttcctttagtaatcactgtggaacacaagaacaggaagaagaaagccatgcttaagaatggtgcttctcagctctgcttaaatgctgcagttttaatgcagttgtcaacaagtagaacctcagtttgctaactgaagtgttttattagtattttactctagtggtgtaattgtaatgtagaacagttgtgtggtagtgtgaaccgtatgaacctaagtagtttggaagaaaaagtagggtttttgtatactagcttttgtatttgaattaattatcattccagctttttatatactatatttcatttatgaagaaattgattttcttttgggagtcacttttaatctgtaattttaaaatacaagtctgaatatttatagttgattcttaactgtgcataaacctagatataccattatcccttttatacctaagaagggcatgctaataattaccactgtcaaagaggcaaaggtgttgatttttgtatataagttaagcctcagtggagtctcatttgttagtttttagtggtaactaagggtaaactcagggttccctgagctatatgcacactcagacctctttgctttaccagtggtgtttgtgagttgctcagtagtaaaaactggcccttacctgacagagccctggctttgacctgctcagccctgtgtgttaatcctctagtagccaattaactactctggggtggcaggttccagagaatcgagtagaccttttgccactcatctgtgttttacttgagacatgtaaatatgatagggaaggaactgaatttctccattcatatttataaccattctagttttatcttccttggctttaagagtgtgccatggaaagtgataagaaatgaacttctaggctaagcaaaaagatgctggagatatttgatactctcatttaaactggtgctttatgtacatgagatgtactaaaataagtaatatagaatttttcttgctaggtaaatccagtaagccaataattttaaagattctttatctgcatcattgctgtttgttactataaattaaatgaacctcatggaaaggttgaggtgtatacctttgtgattttctaatgagttttccatggtgctacaaataatccagactaccaggtctggtagatattaaagctgggtactaagaaatgttatttgcatcctctcagttactcctgaatattctgatttcatacgtacccagggagcatgctgttttgtcaatcaatataaaatatttatgaggtctcccccacccccaggaggttatatgattgctcttctctttataataagagaaacaaattcttattgtgaatcttaacatgctttttagctgtggctatgatggattttattttttcctaggtcaagctgtgtaaaagtcatttatgttatttaaatgatgtactgtactgctgtttacatggacgttttgtgcgggtgctttgaagtgccttgcatcagggattaggagcaattaaattattttttcacgggactgtgtaaagcatgtaactaggtattgctttggtatataactattgtagctttacaagagattgttttatttgaatggggaaaataccctttaaattatgacggacatccactagagatgggtttgaggattttccaagcgtgtaataatgatgtttttcctaacatgacagatgagtagtaaatgttgatatatcctatacatgacagtgtgagactttttcattaaataatattgaaagattttaaaattcatttgaaagtctgatggcttttacaataaaagatattaagaattgtta

SEQ ID NO: 54 - DNA, 2343 bp, Homo sapiens
caatgaatggtgattctcgtgctgcggtggtgacctcaccacccccgaccacagcccctcacaaggagaggtacttcgaccgagtagatgagaacaacccagagtacttgagggagaggaacatggcaccagaccttcgccaggacttcaacatgatggagcaaaagaagagggtgtccatgattctgcaaagccctgctttctgtgaagaattggaatcaatgatacaggagcaatttaagaaggggaagaaccccacaggcctattggcattacagcagattgcagattttatgaccacgaatgtaccaaatgtctacccagcagctccgcaaggagggatggctgccttaaacatgagtcttggtatggtgactcctgtgaacgatcttagaggatctgattctattgcgtatgacaaaggagagaagttattacggtgtaaattggcagcgttttatagactagcagatctctttgggtggtctcagcttatctacaatcatatcacaaccagagtgaactccgagcaggaacacttcctcattgtcccttttgggcttctttacagtgaagtgactgcatccagtttggttaagatcaatctacaaggagatatagtagatcgtggaagcactaatctgggagtgaatcaggccggcttcaccttacactctgcaatttatgctgcacgcccggacgtgaagtgcgtcgtgcacattcacaccccagcaggggctgcggtctctgcaatgaaatgtggcctcttgccaatctccccggaggcgctttcccttggagaagtggcttatcatgactaccatggcattctggttgatgaagaggaaaaagttttgattcagaaaaatctggggcctaaaagcaaggttcttattctccggaaccatgggctcgtgtcagttggagagagcgttgaggaggccttctattacatccataaccttgtggttgcctgtgagatccaggttcgaactctggccagtgcaggaggaccagacaacttagtcctgctgaatcctgagaagtacaaagccaagtcccgttccccagggtctccggtaggggaaggcactggatcgcctcccaagtggcagattggtgagcaggaatttgaagccctcatgcggatgctcgataatctgggctacagaactggctacccttatcgataccctgctctgagagagaagtctaaaaaatacagcgatgtggaggttcctgctagtgtcacaggttactcctttgctagtgacggtgattcgggcacttgctccccactcagacacagttttcagaagcagcagcgggagaagacaagatggctgaactctggccggggcgacgaagcttccgaggaagggcagaatggaagcagtcccaagtcgaagactaaggtgtggacgaacattacacacgatcacgtgaaacccttgctgcagtctctctcgtccggtgtctgcgtgccaagctgtattaccaactgcttgtggactaaagaggatggacatagaacttccacctctgctgtccctaacctgtttgttccattgaacactaacccaaaagaggtccaggagatgaggaacaagatccgagagcagaatttacaggacattaagacggctggccctcagtcccaggttttgtgtggtgtagtgatggacaggagcctcgtccagggagagctggtgacggcctccaaggccatcattgaaaaggagtaccagccccacgtcattgtgagcaccacgggccccaaccccttcaccacactcacagaccgtgagctggaggagtaccgcagggaggtggagaggaagcagaagggctctgaagagaatctggacgaggctagagaacagaaagaaaagagtcctccagaccagcctgcggtcccccacccgcctcccagcactcccatcaagctggaggaaggagacggatgcgctagagagtacctgttaccctaaccttgtgccggagccgactactggagatgacagtgatgctgccacctttaagccaactctccccgatctgtcccctgatgaaccttcagaagcactcggcttcccaatgttagagaaggaggaggaagcccatagacccccaagccccactgaggcccctactgaggccagccccgagccagccccagacccagccccggtggctgaagaggctgccccctcagctgtcgaggagggggccgccgcggaccctggcagcgatgggtctccaggcaagtccccgtccaaaaagaagaagaagttccgtaccccgtcctttctgaagaagagcaagaagaagagtgactcctga

SEQ ID NO: 55 - DNA, 4181 bp, Homo sapiens
  misc_feature (3347)..(3347): n is a, c, g, or t
  misc_feature (3502)..(3502): n is a, c, g, or t
  misc_feature (3506)..(3506): n is a, c, g, or t
  misc_feature (3520)..(3520): n is a, c, g, or t
  misc_feature (3538)..(3538): n is a, c, g, or t
  misc_feature (3549)..(3549): n is a, c, g, or t
  misc_feature (3646)..(3646): n is a, c, g, or t
  misc_feature (3940)..(3940): n is a, c, g, or t
  misc_feature (3968)..(3968): n is a, c, g, or t
  misc_feature (3974)..(3974): n is a, c, g, or t
  misc_feature (4036)..(4036): n is a, c, g, or t
  misc_feature (4056)..(4056): n is a, c, g, or t
  misc_feature (4062)..(4062): n is a, c, g, or t
  misc_feature (4080)..(4080): n is a, c, g, or t
  misc_feature (4088)..(4088): n is a, c, g, or t
  misc_feature (4115)..(4115): n is a, c, g, or t
ggtggatgcgtttgggttgtagctaggctttttcttttctttctcttttaaaacacatctagacaaggaaaaaacaagcctcggatctgatttttcactcctcgttcttgtgcttggttcttactgtgtttgtgtattttaaaggcgagaagacgaggggaacaaaaccagctggatccatccatcaccgtgggtggttttaatttttcgttttttctcgttatttttttttaaacaaccactcttcacaatgaacaaactgtatatcggaaacctcagcgagaacgccgccccctcggacctagaaagtatcttcaaggacgccaagatcccggtgtcgggacccttcctggtgaagactggctacgcgttcgtggactgcccggacgagagctgggccctcaaggccatcgaggcgctttcaggtaaaatagaactgcacgggaaacccatagaagttgagcactcggtcccaaaaaggcaaaggattcggaaacttcagatacgaaatatcccgcctcatttacagtgggaggtgctggatagtttactagtccagtatggagtggtggagagctgtgagcaagtgaacactgactcggaaactgcagttgtaaatgtaacctattccagtaaggaccaagctagacaagcactagacaaactgaatggatttcagttagagaatttcaccttgaaagtagcctatatccctgatgaaatggccgcccagcaaaaccccttgcagcagccccgaggtcgccgggggcttgggcagaggggctcctcaaggcaggggtctccaggatccgtatccaagcagaaaccatgtgatttgcctctgcgcctgctggttcccacccaatttgttggagccatcataggaaaagaaggtgccaccattcggaacatcaccaaacagacccagtctaaaatcgatgtccaccgtaaagaaaatgcgggggctgctgagaagtcgattactatcctctctactcctgaaggcacctctgcggcttgtaagtctattctggagattatgcataaggaagctcaagatataaaattcacagaagagatccccttgaagattttagctcataataactttgttggacgtcttattggtaaagaaggaagaaatcttaaaaaaattgagcaagacacagacactaaaatcacgatatctccattgcaggaattgacgctgtataatccagaacgcactattacagttaaaggcaatgttgagacatgtgccaaagctgaggaggagatcatgaagaaaatcagggagtcttatgaaaatgatattgcttctatgaatcttcaagcacatttaattcctggattaaatctgaacgccttgggtctgttcccacccacttcagggatgccacctcccacctcagggcccccttcagccatgactcctccctacccgcagtttgagcaatcagaaacggagactgttcatcagtttatcccagctctatcagtcggtgccatcatcggcaagcagggccagcacatcaagcagctttctcgctttgctggagcttcaattaagattgctccagcggaagcaccagatgctaaagtgaggatggtgattatcactggaccaccagaggctcagttcaaggctcagggaagaatttatggaaaaattaaagaagaaaactttgttagtcctaaagaagaggtgaaacttgaagctcatatcagagtgccatcctttgctgctggcagagttattggaaaaggaggcaaaacggtgaatgaacttcagaatttgtcaagtgcagaagttgttgtccctcgtgaccagacacctgatgagaatgaccaagtggttgtcaaaataactggtcacttctatgcttgccaggttgcccagagaaaaattcaggaaattctgactcaggtaaagcagcaccaacaacagaaggctctgcaaagtggaccacctcagtcaagacggaagtaaaggctcaggaaacagcccaccacagaggcagatgccaaaccaaagacagattgcttaaccaacagatgggcgctgaccccctatccagaatcacatgcacaagtttttacctagccagttgtttctgaggaccaggcaacttttgaactcctgtctctgtgagaatgtatactttatgctctctgaaatgtatgacacccagctttaaaacaaacaaacaaacaaacaaaaaaagggtgggggagggagggaaagagaagagctctgcacttccctttgttgtagtctcacagtataacagatattctaattcttcttaatattcccccataatgccagaaattggcttaatgatgctttcactaaattcatcaaatagattgctcctaaatccaattgttaaaattggatcagaataattatcacaggaacttaaatgttaagccattagcatagaaaaactgttctcagttttatttttacctaacactaacatgagtaacctaagggaagtgctgaatggtgttggcaggggtattaaacgtgcatttttactcaactacctcaggtattcagtaatacaatgaaaagcaaaattgttccttttttttgaaaattttatatactttataatgatagaagtccaaccgttttttaaaaaataaatttaaaatttaacagcaatcagctaacaggcaaattaagatttttacttctggctggtgacagtaaagctggaaaattaatttcagggttttttgaggcttttgacacagttattagttaaatcaaatgttcaaaaatacggagcagtgcctagtatctggagagcagcactaccatttattctttcatttatagttgggaaagtttttgacggtactaacaaagtggtcgcaggagattttggaacggctggtttaaatggcttcaggagacttcagttttttgtttagctacatgattgaatgcataataaatgctttgtgcttctgactatcaatacctaaagaaagtgcatcagtgaagagatgcaagactttcaactgactggcaaaaagcaagctttagcttgtcttataggatgcttagtttgccactacacttcagaccaatgggacagtcatagatggtgtgacagtgtttaaacgcaacaaaaggctacatttccatggggccagcactgtcatgagcctcactaagctattttgaagatttttaagcactgataaattaaaaaaaaaaaaaaaaaattagactccaccttaagtagtaaagtataacaggatttctgtatactgtgcaatcagttctttgaaaaaaaagtcaaaagatagagaatacaagaaaagttttngggatataatttgaatgactgtgaaaacatatgacctttgataacgaactcatttgctcactccttgacagcaaagcccagtacgtacaattgtgttgggtgtgggtggtctccaaggccacgctgctctctgaattgattttttgagttttggnttgnaagatgatcacagncatgttacactgatcttnaaggacatatnttataaccctttaaaaaaaaaatcccctgcctcattcttatttcgagatgaatttcgatacagactagatgtctttctgaagatcaattagacattntgaaaatgatttaaagtgttttccttaatgttctctgaaaacaagtttcttttgtagttttaaccaaaaaagtgccctttttgtcactggtttctcctagcattcatgatttttttttcacacaatgaattaaaattgctaaaatcatggactggctttctggttggatttcaggtaagatgtgtttaaggccagagcttttctcagtatttgatttttttccccaatatttgattttttaaaaatatacacataggagctgcatttaaaacctgctggtttaaattctgtcanatttcacttctagccttttagtatggcnaatcanaatttacttttacttaagcatttgtaatttggagtatctggtactagctaagaaataattcnataattgagttttgtactcnccaaanatgggtcattcctcatgnataatgtncccccaatgcagcttcattttccaganaccttgacgcaggataaattttttcatcatttaggtccccaaaaaaaaaaaaaaaaaaaaaaaaaa

SEQ ID NO: 56 - DNA, 1641 bp, Homo sapiens
gattcccctcaccctctgcatcctcaaccccatccagtacctcgaagtcctcgagcggtgggaccccggcgggtgaggaggaagaggaggaggaagaggaggaagaggatgacctgagtgagctgccaccgctggaggacatgggacaacccccggcggaggaggctgagcagcctggggccctggcccgagagttccttgctgccatggagcccgagcccgccccagccccggccccagaagagtggctggacattctggggaacgggctgttgaggaagaagacgctggtcccagggccgccaggttcgagccgcccggtcaagggccaggtggtcaccgtacatctgcagacgtcgctggagaatggcacacgggtgcaggaggagccggagctggtgttcactctgggtgactgtgacgtcatccaggccctggatctcagtgtcccactcatggacgtgggggagacggccatggtcactgctgactccaagtactgctacggcccccaaggcaggagcccatacatccccccgcacgcggccctgtgcctggaggtgaccctgaagacggctgtggacgggcctgacctggagatgctcacggggcaggagcgcgtggccctggccaaccggaagcgggagtgcggcaacgcccactaccagcgggcggacttcgtcctggccgccaactcctacgacctcgccatcaaggctatcacctccagcgccaaagtggacatgacgttcgaggaggaggcacagctcctgcagttgaaggtgaagtgtctgaacaacctggcggcctcgcagctgaagctcgaccactaccgcgcagccctgcgctcctgcagccttgtgctggagcaccagccagacaacatcaaggctctcttccgcaagggcaaggtgctggcccagcagggggagtacagtgaggccatccccatcctgagggcagccctgaagctggaaccttccaacaagacgatccacgcagagctctcaaagctggtgaagaagcatgcggcgcagcggagcacggagaccgccttgtaccggaaaatgctgggcaaccccagccggctgcctgctaagtgccctggcaagggtgcctggtccatcccatggaagtggctgtttggggcgactgctgttgccttggggggtgtggcactctctgtggtcatcgctgccaggaactgaccacctaggtggctgccaccccctctgcacaccatggaccctgccctgcgctccccaactcccccaggctccctgtccactgccctccctggtctggccccctcctccgggttaggggagcaaggattgggggtcgtgcagcccagccagcaggagggactgaggccctctaggaggaaagcccagagggagggggccctcattccttcagacccagttttcccccaccctccttaccccgctgggctaggtctccgccagggctggcctcagtttctcctcaacaggcctgggggcagcccttcccctgcctagtccccgcctgagtgccagccccccaccccgcctgccgccccctgtccaggttccctccccgccacagtgaaataaagcatcccaccctgcaaaaaaaaaaaaaaaaaaaaaggaattc

SEQ ID NO: 57 - DNA, 3120 bp, Homo sapiens
cccaaactgacggaggggccaggctgagcagcagcccctctcttacctcagctatgaatctcctgccccccaagtccaagtgcaatccactgtggaatgagtctctgtcatcgctggaggaggggccttcagggtccaccccaccagaggagctgccttccccatcagcctcatccctggggcccatcctgccccctctgcctgggaaccatagtcccactaccctgtgctccttcttcccctggatgagcaacctgaggctggccaattgggccgggggacacctggggcctaatggggagccaggaagggcagccaatgatggggagggcattgtaggggcaaccatgccagactcattcccctacccctcctccaggacatgaacaagctgagtggaggtggtgggtgcaggactcaggtggaagggggccagctggggggtgaggagtggacccgccatgggagctttgtcaataagcccatgtggggctagctgcatcccaatgacaaagtcacgagacctggggtttcctacttggtttggtacatgggctgtgtggaggtcctgcagtcaatgagtgccctggacttcaacacctggactcaggtcaccagggaggccatcagttttgtgtgtgaggctgtgccaggtgccaagggggtgacaaggaggagaaagccctgtaaccatccactcagctctatcctggggaggagtaacctgaaatttgctgcaatgacaatcactctcaccatctccaccagcagcctcaacgtcatggttgcagactgcaaacagattatcaccaaccaccatatgcaatctatctcacttgcatccagtggggatccggacacagccaagtatgtcgccaacgttgccaaagaccctgtgagtcagaaagcatgccacattctggagtgtcctgaagggcttgctcaggatgtcatcagcaccactggccaggccttcaagttgcactttaaacaatacctcagaaaaccacccaaactggtcaccccccatgacaggatgactggctttgatggcttagcttgggatgaggaggaggaagagccgcctggccatcagcactataatgacttcctggggaaggaatcccctctttggcatgtggtatacatgaggcttcgggaaggagccactccaggggctgctcgacccactccacccagtgcccagacccccagccacttgggatctacactgcctgtaggacagtctgttgggggagatccagaagtttgcaaatagatgccacctccaccaccctgtccaggcagagagctctttgatgatccctccaatgtcaacgtgcagaacctagacaaggcccggcaagcagggggtggtgctgggacccccaatcctgccatcaatggcagcacaccctgagacctgtttgacatgaagccctttgaagacactcttcacatgcctcctcttccccagttggtgtccatggctaagcagctctgaggggacccctggttccaagggaagctgagctagcagggggctgaggcactgctgcagttcaatggggacttcctggtgcaggagagcatgaccacacctggccagtatgtgctcactggcttgcagagtggggagtccaagcatctgctactggtggaccctgagggtgtagttcggacaaaggatcaccgctttgagagtgtcagtcacctcatcagctaccacatggacaatcacttgcccatcacctctgctcccagtgaattgtgtctacagcaacctgtggagcagaaactgtgatctgccccagcgctctcttccagaagatgccctccaactcctttccaccctattccctaactctcaggaccccagttgggagtgttctgtgggcatggctttgtgtcagagctgggagtagtgtggacactgggtttcatatccagctgagtgagagggtttgagtcagaaacttgggggagaatactgcttctccccaagcattaatcaatcatcaaagtattaatgtacagagtggccccttacctgggcctttctgtgccaacctgatgtcccttccccaagaaggtgagtgcttgtcatggaaaatgccctgtgggtgataggcccagtggaacagtcaccttctgggcaagggggaacgaatcacacctctgggtttcagggtactccagacccctgtgaacaccccccacccccatgtttaaactttgtgcctttgaccatctcttaggtctgaagatattttatgcaaagagtttttgggaccttgagttcaatgacagggatgccaacaccttcttggtttctgggacctgtcttctccttgcctcagcaccctctccagtttgggttgggataacagaggcaggagtggcagctgtctcctctccctggggatatgtaacccttagagattgccccagggccctctcctggccagggaggagatggatccctcccttgctcagtgcctcctggccgggggggggtgcctcaccaaggcgtgtgtatatacatttcataaggccaccctccatgttgcatgcctattgtactctacagccaaagtgtagcctcctctggagctctgcctgcttcctttctgggagggcggggtgggggtgactgaatttgggcctcttgtacagttaatgctcccaggtggattttgtggaggtaggaaaaggggcattgagactctaaagcagtagacaatccccaaatactatctgtagagagttggaactgcattcttttaaaattttatatgcatatatttagggctgtagactactttctaattgtttccatggcttattcttgagcacaaaatgataatcaattattacatttatacatcacctttttgacttttctcgagcctttacagctcttggcattttcctcacccaggcctgtgaggaactgggaccggcagcattatctttatacagagacctgaggcagatgaaattgattcccagctaggactagaaaaccttgggcctcggactgcgaggctgagaggcagaagtttgcctgaatgcctgtcagttcacggatgataatgcaacctacaattaatgagtacc

SEQ ID NO: 58 - DNA, 1530 bp, Homo sapiens
gacgcggcgcccagcagagtcaggtgcggacgactttgtctgtaggagcagcggcggcttgaggacccggggagaccctcaagaatcgacccatcaggacgccagagctgcttcagcggtgaccaccttctccctctaacacattcttcccttcttcacaaacggcccatgtcagacgaaggctcaagggggagccgcctgcccctggcgctgcccccggcctcccagggttgctcttcagggggcggcggcggcggctcctcggctgggggctcgggcaattcccggcccccacgcaacctccaaggcttgctgcagatggccatcaccgcgggctctgaagagccagaccctcctccagaaccgatgagtgaggagaggcgtcagtggctgcaggaggccatgtcggctgccttccgaggccagcgggaggaggtggagcagatgaagagctgcctccgagtgctgtcacagcccatgccccccactgctggggaggccgagcaggcggccgaccagcaagagcgagagggggccctggagctgctggccgacctgtgtgagaacatggacaatgccgcagacttctgccagctgtctggcatgcacctgctggtgggccggtacctggaggcgggggctgcgggactgcggtggcgggcggcacagctcatcggcacgtgcagtcagaacgtggcagccatccaggagcaggtgctgggcctgggtgccctgcgtaagctgctgcggctgctggaccgcgacgcctgcgacacggtgcgcgtcaaggccctcttcgccatctcctgtctggtccgagagcaggaggctgggctgctgcagttcctccgcctggacggcttctctgtgttgatgagggccatgcagcagcaggtgcagaagctcaaggtcaaatcagcattcctgctgcagaacctgctggtgggccaccctgaacacaaagggaccctgtgctccatggggatggtccagcagctggtggccctggtgcggacagagcacagccccttccacgagcacgtgcttggagccctgtgcagcctggtgacagactttccgcagggtgtgcgcgagtgtcgggagccggaactgggcctggaggagctcctccgccaccgctgtcagctgctgcagcagcatgaggagtaccaggaggagctggagttctgtgaaaagctgctacagacctgtttctccagcccagcggacgacagcatggatcggtgaaaccaggtggcttcttgcccccttctccgtgggaaccccaggcttcttgcctccctccccacctacaaggccctctcccaagggatcgcagggcctaggtgcctggacccagggtgtgccagcccgtctctgtgcagtccctggaaggggcgctgagaaaggcaccagctccttggaccccacctcccatgctctcactctcatccccgttctcttgtccacacagctcttccaataaaggtgtttctcttcctccttctcaagaaaaaaaaaaaaaaaaaa

SEQ ID NO: 59 - DNA, 993 bp, Homo sapiens
gaattcggcacgaggcgccttcttgcccggcggctgctggaaaatgtctcaggagaggcccacgttctaccggcaggagctgaacaagacaatctgggaggtgcccgagcgttaccagaacctgtctccagtgggctctggcgcctatggctctgtgtgtgctgcttttgacacaaaaacggggttacgtgtggcagtgaagaagctctccagaccatttcagtccatcattcatgcgaaaagaacctacagagaactgcggttacttaaacatatgaaacatgaaaatgtgattggtctgttggacgtttttacacctgcaaggtctctggaggaattcaatgatgtgtatctggtgacccatctcatgggggcagatctgaacaacattgtgaaatgtcagaagcttacagatgaccatgttcagttccttatctaccaaattctccgaggtctaaagtatatacattcagctgacataattcacagggacctaaaacctagtaatctagctgtgaatgaagactgtgagctgaagattctggattttggactggctcggcacacagatgatgaaatgacaggctacgtggccactaggtggtacagggctcctgagatcatgctgaactggatgcattacaaccagacagttgatatttggtcagtgggatgcataatggccgagctgttgactggaagaacattgtttcctggtacagaccatattgatcagttgaagctcattttaagactcgttggaaccccaggggctgagcttttgaagaaaatctcctcagagtctgcaagaaactatattcagtctttgactcagatgccgaagatgaactttgcgaatgtatttattggtgccaatcccctgggtaagttgaccatatatcctcacctcatggatattgaattggttatgatataaattggggatttgaagaagagtttctccttttgaccaaataaagtaccattagttga

SEQ ID NO: 60 - DNA, 4398 bp, Homo sapiens
ggccaaaggtcaagatacttctctgggaaatgttgctgctgatgctgctttacaaagtcatacaatgagtgtttggtttaagaaagattttcatacttaaaagattttcatcttggaaatacatcaagtgaaaattaaattcttttgggaaacattttccttctgatatattatacttgtaatgggcgacatggcaaacaactcagttgcttacagtggtgtgaaaaactctttgaaggaagctaatcatgatggagactttggaattacgctcgcagagctgcgggctctcatggagctcaggtccacagatgcattacgaaaaatacaggaaagctatggagatgtctatggaatttgcaccaaattgaaaacatctcccaatgaaggtttaagtggaaaccctgcagatttagaaagaagagaagcagtgtttggaaagaattttatacctcctaaaaagccaaaaacctttcttcaattagtatgggaagcattacaagatgtcactttaattatattagaaattgcagccatagtatcattgggcctttctttttatcagcctccagaaggggataatgcactttgtggagaagtttctgttggggaggaagaaggtgaaggtgaaactgggtggattgaaggagctgcaatcctcttgtctgtagtgtgtgtggtgttagtaacagctttcaatgactggagtaaggagaaacagtttagaggtttgcagagccgaattgaacaagaacagaagttcactgtcatcaggggtggtcaggtcattcagatacctgtagctgacattactgttggagatattgctcaagtgaaatatggtgatcttcttccagctgacggcatacttattcaaggcaacgatcttaaaattgatgaaagctcattgactggtgaatcagatcatgttaaaaagtctttagataaggatcccttacttctatcaggtactcatgtaagggaaggctctggaagaatggtagttacagctgtaggtgtaaattctcaaactggaattatctttaccttacttggagctggaggtgaagaggaagagaagaaagatgagaagaaaaaggaaaagaaaaataagaaacaagatggagctattgagaatcgcaacaaagcaaaagcccaggatggtgcagccatggaaatgcagccattgaagagtgaagaaggtggagatggtgatgaaaaagataaaaagaaagcaaatttgccaaaaaaggaaaaatctgttttacaagggaaacttacaaaactggctgttcagattggcaaagcaggtctgttgatgtctgccatcacagttatcattctagtattatattttgtcattgacaccttctgggttcagaaaagaccatggcttgctgagtgcacaccaatttatatacaatactttgtgaagttcttcattattggagttacagttttagtggtcgcagtgccagaaggtcttccacttgcagtcacgatctcactggcttattcagtcaaaaaaatgatgaaagataataacttagtaaggcatctggatgcttgtgaaaccatgggaaatgctacagctatttgttcagataaaacaggaactttgacaatgaacagaatgacagtcgttcaagcttacataaatgaaaaacattataaaaaggttcctgaaccagaagctattccaccaaatattttgtcctatcttgtaacaggaatttctgtgaattgtgcttatacatcaaaaatattgccaccagagaaagagggtggattacctcgtcacgttggtaataaaactgaatgtgccttgttgggacttcttttggatttaaaacgggattatcaggatgttagaaatgaaataccagaagaagcactgtacaaagtctacaccttcaattctgttaggaagtccatgagtactgtcctgaaaaattcagatggaagttatcgaatattcagcaagggtgcatctgagataattctgaaaaagtgtttcaaaatcttgagtgctaatggtgaggcaaaagtattcagaccaagggaccgtgatgatattgtaaaaactgtgattgaaccgatggcatcagaaggcttgagaaccatatgtcttgcattcagagattttccagcaggagaaccagaaccagagtgggataatgaaaatgatattgtcaccggccttacatgcattgctgttgtggggattgaagatcctgtgagacctgaggtgccagatgcaattaaaaagtgtcagagggctggaattactgtgcggatggtcactggtgataatattaatactgctcgggccattgctaccaaatgtggtattttacatcctggggaagattttctgtgcctagaaggtaaagattttaacagaagaatacgaaatgaaaaaggagagattgagcaagagaggatagacaagatttggccaaaacttcgagtacttgcaagatcatctcctactgataagcatacactggttaaaggtataattgacagcactgtctcagaccaacgccaggttgtagctgtaactggtgatggtacaaatgatggcccagcactaaagaaagcagatgttggatttgcaatgggtattgctggaactgatgtagctaaagaagcatccgatattattctcacagatgacaactttacaagcattgttaaagcagttatgtggggacgaaatgtctatgacagcatctcaaaattccttcagttccaacttactgttaatgtagtagcagtgattgttgcttttacgggcgcctgcattactcaagactcaccgcttaaggctgtgcagatgctgtgggtaaacctcataatggatacactcgcttccctggctctggcaacggaaccacccactgagtctctcttgcttcggaaaccttatggtagaaataagcctctcatctcacgtacaatgatgaagaatattttgggtcatgcattctatcaacttgtagtagtctttacactcttatttgctggagaaaagttttttgacattgatagtggaagaaatgctcctttgcatgctcctccttcagaacattatactattgtttttaatacctttgtgctgatgcaacttttcaacgaaataaatgcccggaaaattcatggtgaaagaaatgtattcgaaggaatctttaacaatgccatcttctgcacaattgttttaggcacttttgtggtacagataataattgtgcagtttggtggaaaacctttcagttgttcagaactttcaatagaacagtggctatggtcaatattcctaggaatgggaacattactctggggccagcttatttcaacaattccaactagccgtttaaaattcctcaaagaagctggtcatggaacacaaaaggaagaaatacctgaggaggaattagcagaggatgttgaagagattgatcacgctgaaagggagttgcggcgtggccaaatcttgtggtttagaggtctgaacagaatccaaacacagattcgagtggtgaatgcatttcgtagttctttatatgaagggttagaaaaaccggaatcaagaagttcgattcacaactttatgacacatcctgagtttaggatagaagattcagagcctcatatcccccttattgatgacactgatgccgaagatgatgctcctacaaaacgtaactccagtcctccaccctctcccaacaaaaataacaatgctgttgacagtggaattcaccttacaatagaaatgaacaagtctgctacctcttcatccccaggaagcccactacatagtttggaaacatcactctgattgtaagctgaatgttaacacactagctgcattgtaaagaaacaaattgaaactgggtcttttcacatattgtgatggacaagctagtattcttgtctttggacttcaacagaagacacacttgtacgaatgtagatttatttttttaaaaaaaaaaaagcaaagctttctgccagactgagggtgctttttggggggtgggagaaatgaactgacagataaacagtaactcagcgtaagtgacctgtggatcatcagtagtacccaagcatggtcctgaacagtgtattagcagagctttagtttatctcagtcctggatgggagagagagggaggagtaaaactgggcaagacaaagagccctggatcgttgaattgatagtttaatttctgctgttggctgttaataatttggattatttatgtttataaatgatacagatctgtttacaaggtttgtagatactttttttgttcctgttcatagatgggaagcttccttataactgatgcagagaaaaattagtccttcaaatactgctgtattttcagg

SEQ ID NO: 61 - DNA, 4237 bp, Homo sapiens
tcccgaaaccagagggatggggccggctgtgcagtagaacggggatcgaaaagaggaaaacaagggcacgaagaccagcgagaaagaagaggacacctgggaaaggcggaagcagaagacggggaagggaaaagaaacccatagcaggtggaaaccagatctagagcaacaccgtcaggttcacagtttgtttttctagaagagaagaaagtacctgaggattgctcttttttcctaccgttaatgaaaactacttttgtcttcatcataaaagaaaaaactaaggggaggtaaaggcagtctcctgttttattagggggagaggtgaagggaaatccaggctcactttctgaataagccactgcctggtgcacagagcagaaccatcctggtttctgaagacacatccctttcagcagaattccagccggagtcgctggcacagttctatttttatatttaaatgtatgtctcccctggcctttttttttttttttttttttttttagcaacacttttcttgtttgtaaacgcgagtgaccagaaagtgtgaatgcggagtaggaatatttttcgtgttctcttttatctgcttgccttttttagagagtagcagtggttcctatttcggaaaaggacgttctaattcaaagctctctcccaatatatttacacgaatacgcatttagaaagggaggcagcttttgaggttgcaatcctactgagaaggatggaagaaggagccaggcaccgaaacaacaccgaaaagaaacacccaggtgggggcgagtcggacgccagccccgaggctggttccggagggggcggagtagccctgaagaaagagatcggattggtcagtgcctgtggtatcatcgtagggaacatcatcggctctggaatctttgtctcgccaaagggagtgctggagaatgctggttctgtgggccttgctctcatcgtctggattgtgacgggcttcatcacagttgtgggagccctctgctatgctgaactcggggtcaccatccccaaatctggaggtgactactcctatgtcaaggacatcttcggaggactggctgggttcctgaggctgtggattgctgtgctggtgatctaccccaccaaccaggctgtcatcgccctcaccttctccaactacgtgctgcagccgctcttccccacctgcttccccccagagtctggccttcggctcctggctgccatctgcttattgctcctcacatgggtcaactgttccagtgtgcggtgggccacccgggttcaagacatcttcacagctgggaagctcctggccttggccctgattatcatcatggggattgtacagatatgcaaaggagagtacttctggctggagccaaagaatgcatttgaggatttccaggaacctgacatcggcctcgtcgcactggctttccttcagggctcctttgcctatggaggctggaactttctgaattacgtgactgaggagcttgttgatccctacaagaaccttcccagagccatcttcatctccatcccactggtcacatttgtgtatgtctttgccaatgtcgcttatgtcactgcaatgtccccccaggagctgctggcatccaacgccgtcgctgtgacttttggagagaagctcctaggagtcatggcctggatcatgcccatttctgttgccctgtccacatttggaggagttaatgggtctctcttcacctcctctcggctgttcttcgctggagcccgagagggccaccttcccagtgtgttggccatgatccacgtgaagcgctgcaccccaatcccagccctgctcttcacatgcatctccaccctgctgatgctggtcaccagcgacatgtacacactcatcaactacgtgggcttcatcaactacctcttctatgggggcacggttgctggacagatagtccttcgctggaagaagcctgatatcccccgccccatcaagatcaacctgctgttccccatcatctacttgctgttctgggccttcctgctggtcttcagcctgtggtcagagccggtggtgtgtggcattggcctggccatcatgctgacaggagtgcctgtctatttcctgggtgtttactggcaacacaagcccaagtgtttcagtgacttcattgagctgctaaccctggtgagccagaagatgtgtgtggtcgtgtaccccgaggtggagcggggctcagggacagaggaggctaatgaggacatggaggagcagcagcagcccatgtaccaacccactcccacgaaggacaaggacgtggcggggcagccccagccctgaggaccaccattccctggctactctctccttcctcccccttttatcctacctccctgccttggtcccgccaacacatgcgagtacacacacacccctctctctgcttttgtcaggcagtggtaggactttggtgtgggtggtgagaaattgtaaacaaaaactgacattcatacccaaagaaccagcctctcaccccagggtccatgtcccaggccccactccagtgctgcccacactcccagctgctggaggagaggggagatgccaaggtgccctgcaggacctccctccgggccacaccctcagctgcctcttcaggaaccggagctcattactgccttccctcccagggaggccccttcagagaggagaggccaggagctgcattgtggggggacaggctcaagcaattctgtccccatcaaggggtcagctggagagacccaagaccctatctgttcaccagggacccaaaatccaaggggatgcttccctctgccctctttcctgcccctccccatcatacctgcacccaccccagccagggctccctgtccagaattcggttctcctcaggacgccaactcccagagctaaggaccaaggagaagaacagcctctccacccccaagccaggcggttgaggaacatattgagaaaggttcagattgcagaaacccagccctgcccctgcctcctgcatccagcccccaacatggtgccaaagcttccagaagccaaaaagcttctgatttttaaggtagtgggcatctctctcctaatgacgaagctgctcagcaactccacctgcccgccgcaggaaggagcagtcccctgctatccctgcagccactcccagcacacccgcacacagccagcaccaccgccccaccgtgcacttctcctctctgggccttggcttgggaccaggtacgaaggatccccaagcccttcaggcctgagatcagagccagatcagccttaagtcacctcccatccaagaacttggcctaaaaatactcccctatttctaaccctcaggacggatctgatattaaatgccttccctgggaggaagggtgctttccccctccctagaggtgcccattccataccctgggagactgaggagagcattggctgaagcccagttcctttcccatccatccccaactccaataatcccccactcctcgcaggtctcagtgtcatgctgtcttggggcagggtgaaagggtagtggcagcagggcgcccactctggagatcctcaaaaaaggccctcctctgtggctggcagcctctgacctttccctgggcttcaaaggaaggctatggagtttgctgtgggccctgcaaccttcccagccactcctgctgcactaaggacttaggatccttttatcacaaatcgggattctctcccccaccccgaattctgtctgcttaaactggaatacacaggagcccttcctggcctggatggtgtctcccagcttccccgcccagcttgcccaccccatagttggtgagatgccaagtttggtctgagttgtgaccccttcagagtagatgcccggcaggctggggttggcccctggagggtcaggggaccatcttcttattccctcttttctcattcctccaacttcctcccctccttcaattatttttttgtaaagttgatgccttactttttggataaatatttttgaagctggtatttctatttcttttggattttttttaatgtaaggttgttttgggggatggagttagaaccttaatgataatttctttcgtttggtgtaggttttagagatttgttttgtggagaggtttttttcttttgatgtaataaaatttaaaatggaaatgaaaaaaaaaaaaaaaaaaaaaa

SEQ ID NO: 62 - DNA, 2748 bp, Homo sapiens
ctcttccacatcaccttggtgtctccctaaataaaaccagccctccttatcgcctggaaaaaatcaagagctagagtttgaatgggttttatataaacactcacccctgtcagcgtgcggctgggctctcaggataaactcacagcatctggcgcgatgcttgccttgcgttctctcccctgaacgtcaaggtttaagcagagcccgaggactgggagctcttctctgaaattcgatcaacctgaagccagttgcggaactgcacggggtcccgatggacctcaaggaaagccccagtgagggcagcctgcaaccttctagcatccagatctttgccaacacctccaccctccatggcatccgccacatcttcgtgtatgggccgctgaccatccggcgtgtgctgtgggcagtggccttcgtgggctctctgggcctgctgctggtggagagctctgagagggtgtcctactacttctcctaccagcatgtcactaaggtggacgaagtggtggctcaaagcctggtcttcccagctgtgaccctctgtaacctsaatggcttccggttctccaggctcaccaccaacgacctgtaccatgctggggagctgctggccctgctggatgtcaacctgcagatcccggacccccatctggctgacccctccgtgctggaggccctgcggcagaaggccaacttcaagcactacaaacccaagcagttcagcatgctggagttcctgcaccgtgtgggccatgacctgaaggatatgatgctctactgcaagttcaaagggcaggagtgcggccaccaagacttcaccacagtgtttacaaaatatgggaagtgttacatgtttaactcaggcgaggatggcaaacctctgctcaccacggtcaagggggggacaggcaacgggctggagatcatgctggacattcagcaggatgagtacctgcccatctggggagagacagaggaaacgacatttgaagcaggagtgaaagttcagatccacagtcagtctgagccacctttcatccaagagctgggctttggggtggctccagggttccagacctttgtggccacacaggagcagaggctcacatacctgcccccaccgtggggtgagtgccgatcctcagagatgggcctcgacttttttcctgtttacagcatcaccgcctgtaggattgactgtgagacccgctacattgtggaaaactgcaactgccgcatggttcacatgccaggggatgcccctttttgtacccctgagcagcacaaggagtgtgcagagcctgccctaggtctgttggcggaaaaggacagcaattactgtctctgcaggacaccctgcaacctaacccgctacaacaaagagctctccatggtgaagatccccagcaagacatcagccaagtaccttgagaagaaatttaacaaatcagaaaaatatatctcagagaacatccttgttctggatatattttttgaagctctcaattatgagacaattgaacagaagaaggcgtatgaagttgctgccttacttggtgatattggtggtcagatgggattgttcattggtgctagtatccttacaatactagagctctttgattatatttatgagctgatcaaagagaagctattagacctgcttggcaaagaggaggacgaagggagccacgatgagaatgtgagtacttgtgacacaatgccaaaccactctgaaaccatcagtcacactgtgaacgtgcccctgcagacgaccctggggaccttggaggagattgcctgctgacacccctcgagtcacccagcactccctccaaacagaccttgaggcccaagacccaggacaaggaacagcaagctcaggtgggatggccccagtgctggaaagaagcaagagccccctatgcacacattgcagactagctgcctagacctcgctccggccacgtccaacacgacgcatccttgggccccgccgtgcgtccctcttaggagagatgagtcacactctggaactgtccaagaacgaacctgccatcacatctcactgccagatgtataaagcacctgcatgctcagacttcttgtggcgccacctccacgtctgtcttgtacatgacactcctccacgcggtttccagtgtccacactgctgcccgtgcagtgggaccagattccaggtccaaagtcaccatgaggccaccctggaatcagaactgcacaatcaagagggaacccatgggactctctgctacattcagttcttgtgtcgtttgtgaaagttcttaacctgcccaaaaacccccttttccccaagctgcccayggggcttcggcgccaaaggtgacccgcgccaacctccctccccccccagtgcctrtgacggcggcacagcagccagcgggtgggggacgcctgtgttcacccatggtgcccatgtcgttcttctctccctgtgacacagcttgtacagtctgattctttttatctggggtaggggggcttttatgtttgtccgatggagatttgttttgttttgcttcattttatgcttttttattttagttttgatgttctgaggtttgctttggtttttccattttctttggcatttatttattcgtgcttcaaatcacagtcatattaaaagctggtcttgtggaaaaaaaaaaaaaaaaaaaaaaaaaaaaaaaaaaaaaaaaaaaaaaaaaaaaaaaaaaa

SEQ ID NO: 63 - DNA, 12783 bp, Homo sapiens
atttccgggtccgggccgagcgggcgcacgcgcgggagcgggactcggcggcatggcgggctccggagccggtgtgcgttgctccctgctgcggctgcaggagaccttgtccgctgcggaccgctgcggtgctgccctggccggtcatcaactgatccgcggcctggggcaggaatgcgtcctgagcagcagccccgcggtgctggcattacagacatctttagttttttccagagatttcggtttgcttgtatttgtccggaagtcactcaacagtattgaatttcgtgaatgtagagaagaaatcctaaagtttttatgtattttcttagaaaaaatgggccagaagatcgcaccttactctgttgaaattaagaacacttgtaccagtgtttatacaaaagatagagctgctaaatgtaaaattccagccctggaccttcttattaagttacttcagacttttagaagttctagactcatggatgaatttaaaattggagaattatttagtaaattctatggagaacttgcattgaaaaaaaaaataccagatacagttttagaaaaagtatatgagctcctaggattattgggtgaagttcatcctagtgagatgataaataatgcagaaaacctgttccgcgcttttctgggtgaacttaagacccagatgacatcagcagtaagagagcccaaactacctgttctggcaggatgtctgaaggggttgtcctcacttctgtgcaacttcactaagtccatggaagaagatccccagacttcaagggagatttttaattttgtactaaaggcaattcgtcctcagattgatctgaagagatatgctgtgccctcagctggcttgcgcctatttgccctgcatgcatctcagtttagcacctgccttctggacaactacgtgtctctatttgaagtcttgttaaagtggtgtgcccacacaaatgtagaattgaaaaaagctgcactttcagccctggaatcctttctgaaacaggtttctaatatggtggcgaaaaatgcagaaatgcataaaaataaactgcagtactttatggagcagttttatggaatcatcagaaatgtggattcgaacaacaaggagttatctattgctatccgtggatatggactttttgcaggaccgtgcaaggttataaacgcaaaagatgttgacttcatgtacgttgagctcattcagcgctgcaagcagatgttcctcacccagacagacactggtgactaccgtgtttatcagatgccaagcttcctccagtctgttgcaagcgtcttgctgtaccttgacacagttcctgaggtgtatactccagttctggagcacctcgtggtgatgcagatagacagtttcccacagtacagtccaaaaatgcagctggtgtgttgcagagccatagtgaaggtgttcctagctttggcagcaaaagggccagttctcaggaattgcattagtactgtggtgcatcagggtttaatcagaatatgttctaaaccagtggtccttccaaagggccctgagtctgaatctgaagaccaccgtgcttcaggggaagtcagaactggcaaatggaaggtgcccacatacaaagactacgtggatctcttcagacatctcctgagctctgaccagatgatggattctattttagcagatgaagcatttttctctgtgaattcctccagtgaaagtctgaatcatttactttatgatgaatttgtaaaatccgttttgaagattgttgagaaattggatcttacacttgaaatacagactgttggggaacaagagaatggagatgaggcgcctggtgtttggatgatcccaacttcagatccagcggctaacttgcatccagctaaacctaaagatttttcggctttcattaacctggtggaattttgcagagagattctccctgagaaacaagcagaattttttgaaccatgggtgtactcattttcatatgaattaattttgcaatctacaaggttgcccctcatcagtggtttctacaaattgctttctattacagtaagaaatgccaagaaaataaaatatttcgagggagttagtccaaagagtctgaaacactctcctgaagacccagaaaagtattcttgctttgctttatttgtgaaatttggcaaagaggtggcagttaaaatgaagcagtacaaagatgaacttttggcctcttgtttgacctttcttctgtccttgccacacaacatcattgaactcgatgttagagcctacgttcctgcactgcagatggctttcaaactgggcctgagctatacccccttggcagaagtaggcctgaatgctctagaagaatggtcaatttatattgacagacatgtaatgcagccttattacaaagacattctcccctgcctggatggatacctgaagacttcagccttgtcagatgagaccaagaataactgggaagtgtcagctctttctcgggctgcccagaaaggatttaataaagtggtgttaaagcatctgaagaagacaaagaacctttcatcaaacgaagcaatatccttagaagaaataagaattagagtagtacaaatgcttggatctctaggaggacaaataaacaaaaatcttctgacagtcacgtcctcagatgagatgatgaagagctatgtggcctgggacagagagaagcggctgagctttgcagtgccctttagagagatgaaacctgtcattttcctggatgtgttcctgcctcgagtcacagaattagcgctcacagccagtgacagacaaactaaagttgcagcctgtgaacttttacatagcatggttatgtttatgttgggcaaagccacgcagatgccagaagggggacagggagccccacccatgtaccagctctataagcggacgtttcctgtgctgcttcgacttgcgtgtgatgttgatcaggtgacaaggcaactgtatgagccactagttatgcagctgattcactggttcactaacaacaagaaatttgaaagtcaggatactgtttccttactagaagctatattggatggaattgtggaccctgttgacagtactttaagagatttttgtggtcggtgtattcgagaattccttaaatggtccattaagcaaataacaccacagcagcaggagaagagtccagtaaacaccaaatcgcttttcaagcgactttatagccttgcgcttcaccccaatgctttcaagaggctgggagcatcacttgcctttaataatatctacagggaattcagggaagaagagtctctggtggaacagtttgtgtttgaagccttggtgatatacatggagagtctggccttagcacatgcagatgagaagtccttaggtacaattcaacagtgttgtgatgccattgatcacctatgccgcatcattgaaaagaagcatgtttctttaaataaagcaaagaaacgacgtttgccgcgaggatttccaccttccgcatcattgtgtttattggatctggtcaagtggcttttagctcattgtgggaggccccagacagaatgtcgacacaaatccattgaactcttttataaattcgttcctttattgccaggcaacagatcccctaatttgtggctgaaagatgttctcaaggaagaaggtgtctcttttctcatcaacacctttgaggggggtggctgtggccagccctcgggcatcctggcccagcccaccctcttgtaccttcgggggccattcagcctgcaggccacgctatgctggctggacctgctcctggccgcgttggagtgctacaacacgttcattggcgagagaactgtaggagcgctccaggtcctaggtactgaagcccagtcttcacttttgaaagcagtggctttcttcttagaaagcattgccatgcatgacattatagcagcagaaaagtgctttggcactggggcagcaggtaacagaacaagcccacaagagggagaaaggtacaactacagcaaatgcaccgttgtggtccggattatggagtttaccacgactctgctaaacacctccccggaaggatggaagctcctgaagaaggacttgtgtaatacacacctgatgagagtcctggtgcagacgctgtgtgagcccgcaagcataggtttcaacatcggagacgtccaggttatggctcatcttcctgatgtttgtgtgaatctgatgaaagctctaaagatgtccccatacaaagatatcctagagacccatctgagagagaaaataacagcacagagcattgaggagctttgtgccgtcaacttgtatggccctgacgcgcaagtggacaggagcaggctggctgctgttgtgtctgcctgtaaacagcttcacagagctgggcttctgcataatatattaccgtctcagtccacagatttgcatcattctgttggcacagaacttctttccctggtttataaaggcattgcccctggagatgagagacagtgtctgccttctctagacctcagttgtaagcagctggccagcggacttctggagttagcctttgcttttggaggactgtgtgagcgccttgtgagtcttctcctgaacccagcggtgctgtccacggcgtccttgggcagctcacagggcagcgtcatccacttctcccatggggagtatttctatagcttgttctcagaaacgatcaacacggaattattgaaaaatctggatcttgctgtattggagctcatgcagtcttcagtggataataccaaaatggtgagtgccgttttgaacggcatgttagaccagagcttcagggagcgagcaaaccagaaacaccaaggactgaaacttgcgactacaattctgcaacactggaagaagtgtgattcatggtgggccaaagattcccctctcgaaactaaaatggcagtgctggccttactggcaaaaattttacagattgattcatctgtatcttttaatacaagtcatggttcattccctgaagtctttacaacatatattagtctacttgctgacacaaagctggatctacatttaaagggccaagctgtcactcttcttccattcttcaccagcctcactggaggcagtctggaggaacttagacgtgttctggagcagctcatcgttgctcacttccccatgcagtccagggaatttcctccaggaactccgcggttcaataattatgtggactgcatgaaaaagtttctagatgcattggaattatctcaaagccctatgttgttggaattgatgacagaagttctttgtcgggaacagcagcatgtcatggaagaattatttcaatccagtttcaggaggattgccagaaggggttcatgtgtcacacaagtaggccttctggaaagcgtgtatgaaatgttcaggaaggatgacccccgcctaagtttcacacgccagtcctttgtggaccgctccctcctcactctgctgtggcactgtagcctggatgctttgagagaattcttcagcacaattgtggtggatgccattgatgtgttgaagtccaggtttacaaagctaaatgaatctacctttgatactcaaatcaccaagaagatgggctactataagattctagacgtgatgtattctcgccttcccaaagatgatgttcatgctaaggaatcaaaaattaatcaagttttccatggctcgtgtattacagaaggaaatgaacttacaaagacattgattaaattgtgctacgatgcatttacagagaacatggcaggagagaatcagctgctggagaggagaagactttaccattgtgcagcatacaactgcgccatatctgtcatctgctgtgtcttcaatgagttaaaattttaccaaggttttctgtttagtgaaaaaccagaaaagaacttgcttatttttgaaaatctgatcgacctgaagcgccgctataattttcctgtagaagttgaggttcctatggaaagaaagaaaaagtacattgaaattaggaaagaagccagagaagcagcaaatggggattcagatggtccttcctatatgtcttccctgtcatatttggcagacagtaccctgagtgaggaaatgagtcaatttgatttctcaaccggagttcagagctattcatacagctcccaagaccctagacctgccactggtcgttttcggagacgggagcagcgggaccccacggtgcatgatgatgtgctggagctggagatggacgagctcaatcggcatgagtgcatggcgcccctgacggccctggtcaagcacatgcacagaagcctgggcccgcctcaaggagaagaggattcagtgccaagagatcttccttcttggatgaaattcctccatggcaaactgggaaatccaatagtaccattaaatatccgtctcttcttagccaagcttgttattaatacagaagaggtctttcgcccttacgcgaagcactggcttagccccttgctgcagctggctgcttctgaaaacaatggaggagaaggaattcactacatggtggttgagatagtggccactattctttcatggacaggcttggccactccaacaggggtccctaaagatgaagtgttagcaaatcgattgcttaatttcctaatgaaacatgtctttcatccaaaaagagctgtgtttagacacaaccttgaaattataaagacccttgtcgagtgctggaaggattgtttatccatcccttataggttaatatttgaaaagttttccggtaaagatcctaattctaaagacaactcagtagggattcaattgctaggcatcgtgatggccaatgacctgcctccctatgacccacagtgtggcatccagagtagcgaatacttccaggctttggtgaataatatgtcctttgtaagatataaagaagtgtatgccgctgcagcagaagttctaggacttatacttcgatatgttatggagagaaaaaacatactggaggagtctctgtgtgaactggttgcgaaacaattgaagcaacatcagaatactatggaggacaagtttattgtgtgcttgaacaaagtgaccaagagcttccctcctcttgcagacaggttcatgaatgctgtgttctttctgctgccaaaatttcatggagtgttgaaaacactctgtctggaggtggtactttgtcgtgtggagggaatgacagagctgtacttccagttaaagagcaaggacttcgttcaagtcatgagacatagagatgatgaaagacaaaaagtatgtttggacataatttataagatgatgccaaagttaaaaccagtagaactccgagaacttctgaaccccgttgtggaattcgtttcccatccttctacaacatgtagggaacaaatgtataatattctcatgtggattcatgataattacagagatccagaaagtgagacagataatgactcccaggaaatatttaagttggcaaaagatgtgctgattcaaggattgatcgatgagaaccctggacttcaattaattattcgaaatttctggagccatgaaactaggttaccttcaaataccttggaccggttgctggcactaaattccttatattctcctaagatagaagtgcactttttaagtttagcaacaaattttctgctcgaaatgaccagcatgagcccagattatccaaaccccatgttcgagcatcctctgtcagaatgcgaatttcaggaatataccattgattctgattggcgtttccgaagtactgttctcactccgatgtttgtggagacccaggcctcccagggcactctccagacccgtacccaggaagggtccctctcagctcgctggccagtggcagggcagataagggccacccagcagcagcatgacttcacactgacacagactgcagatggaagaagctcatttgattggctgaccgggagcagcactgacccgctggtcgaccacaccagtccctcatctgactccttgctgtttgcccacaagaggagtgaaaggttacagagagcacccttgaagtcagtggggcctgattttgggaaaaaaaggctgggccttccaggggacgaggtggataacaaagtgaaaggtgcggccggccggacggacctactacgactgcgcagacggtttatgagggaccaggagaagctcagtttgatgtatgccagaaaaggcgttgctgagcaaaaacgagagaaggaaatcaagagtgagttaaaaatgaagcaggatgcccaggtcgttctgtacagaagctaccggcacggagaccttcctgacattcagatcaagcacagcagcctcatcaccccgttacaggccgtggcccagagggacccaataattgcaaaacagctctttagcagcttgttttctggaattttgaaagagatggataaatttaagacactgtctgaaaaaaacaacatcactcaaaagttgcttcaagacttcaatcgttttcttaataccaccttctctttctttccaccctttgtctcttgtattcaggacattagctgtcagcacgcagccctgctgagcctcgacccagcggctgttagcgctggttgcctggccagcctacagcagcccgtgggcatccgcctgctagaggaggctctgctccgcctgctgcctgctgagctgcctgccaagcgagtccgtgggaaggcccgcctccctcctgatgtcctcagatgggtggagcttgctaagctgtatagatcaattggagaatacgacgtcctccgtgggatttttaccagtgagataggaacaaagcaaatcactcagagtgcattattagcagaagccagaagtgattattctgaagctgctaagcagtatgatgaggctctcaataaacaagactgggtagatggtgagcccacagaagccgagaaggatttttgggaacttgcatcccttgactgttacaaccaccttgctgagtggaaatcacttgaatactgttctacagccagtatagacagtgagaaccccccagacctaaataaaatctggagtgaaccattttatcaggaaacatatctaccttacatgatccgcagcaagctgaagctgctgctccagggagaggctgaccagtccctgctgacatttattgacaaagctatgcacggggagctccagaaggcgattctagagcttcattacagtcaagagctgagtctgctttacctcctgcaagatgatgttgacagagccaaatattacattcaaaatggcattcagagttttatgcagaattattctagtattgatgtcctcttacaccaaagtagactcaccaaattgcagtctgtacaggctttaacagaaattcaggagttcatcagctttataagcaaacaaggcaatttatcatctcaagttccccttaagagacttctgaacacctggacaaacagatatccagatgctaaaatggacccaatgaacatctgggatgacatcatcacaaatcgatgtttctttctcagcaaaatagaggagaagcttacccctcttccagaagataatagtatgaatgtggatcaagatggagaccccagtgacaggatggaagtgcaagagcaggaagaagatatcagctccctgatcaggagttgcaagttttccatgaaaatgaagatgatagacagtgcccggaagcagaacaatttctcacttgctatgaaactactgaaggagctgcataaagagtcaaaaaccagagacgattggctggtgagctgggtgcagagctactgccgcctgagccactgccggagccggtcccagggctgctctgagcaggtgctcactgtgctgaaaacagtctctttgttggatgagaacaacgtgtcaagctacttaagcaaaaatattctggctttccgtgaccagaacattctcttgggtacaacttacaggatcatagcgaatgctctcagcagtgagccagcctgccttgctgaaatcgaggaggacaaggctagaagaatcttagagctttctggatccagttcagaggattcagagaaggtgatcgcgggtctgtaccagagagcattccagcacctctctgaggctgtgcaggcggctgaggaggaggcccagcctccctcctggagctgtgggcctgcagctggggtgattgatgcttacatgacgctggcagatttctgtgaccaacagctgcgcaaggaggaagagaatgcatcagttattgattctgcagaactgcaggcgtatccagcacttgtggtggagaaaatgttgaaagctttaaaattaaattccaatgaagccagattgaagtttcctagattacttcagattatagaacggtatccagaggagactttgagcctcatgacaaaagagatctcttccgttccctgctggcagttcatcagctggatcagccacatggtggccttactggacaaagaccaagccgttgctgttcagcactctgtggaagaaatcactgataactacccgcaggctattgtttatcccttcatcataagcagcgaaagctattccttcaaggatacttctactggtcataagaataaggagtttgtggcaaggattaaaagtaagttggatcaaggaggagtgattcaagattttattaatgccttagatcagctctctaatcctgaactgctctttaaggattggagcaatgatgtaagagctgaactagcaaaaacccctgtaaataaaaaaaacattgaaaaaatgtatgaaagaatgtatgcagccttgggtgacccaaaggctccaggcctgggggcctttagaaggaagtttattcagacttttggaaaagaatttgataaacattttgggaaaggaggttctaaactactgagaatgaagctcagtgacttcaacgacattaccaacatgctacttttaaaaatgaacaaagactcaaagccccctgggaatctgaaagaatgttcaccctggatgagcgacttcaaagtggagttcctgagaaatgagctggagattcccggtcagtatgacggtaggggaaagccattgccagagtaccacgtgcgaatcgccgggtttgatgagcgggtgacagtcatggcgtctctgcgaaggcccaagcgcatcatcatccgtggccatgacgagagggaacaccctttcctggtgaagggtggcgaggacctgcggcaggaccagcgcgtggagcagctcttccaggtcatgaatgggatcctggcccaagactccgcctgcagccagagggccctgcagctgaggacctatagcgttgtgcccatgacctccagtgatcccagggcaccgccgtgtgaatataaagattggctgacaaaaatgtcaggaaaacatgatgttggagcttacatgctaatgtataagggcgctaatcgtactgaaacagtcacgtcttttagaaaacgagaaagtaaagtgcctgctgatctcttaaagcgggccttcgtgaggatgagtacaagccctgaggctttcctggcgctccgctcccacttcgccagctctcacgctctgatatgcatcagccactggatcctcgggattggagacagacatctgaacaactttatggtggccatggagactggcggcgtgatcgggatcgactttgggcatgcgtttggatccgctacacagtttctgccagtccctgagttgatgccttttcggctaactcgccagtttatcaatctgatgttaccaatgaaagaaacgggccttatgtacagcatcatggtacacgcactccgggccttccgctcagaccctggcctgctcaccaacaccatggatgtgtttgtcaaggagccctcctttgattggaaaaattttgaacagaaaatgctgaaaaaaggagggtcatggattcaagaaataaatgttgctgaaaaaaattggtacccccgacagaaaatatgttacgctaagagaaagttagcaggtgccaatccagcagtcattacttgtgatgagctactcctgggtcatgagaaggcccctgccttcagagactatgtggctgtggcacgaggaagcaaagatcacaacattcgtgcccaagaaccagagagtgggctttcagaagagactcaagtgaagtgcctgatggaccaggcaacagaccccaacatccttggcagaacctgggaaggatgggagccctggatgtgaggtctgtgggagtctgcagatagaaagcattacattgtttaaagaatctactatacttggttggcagcattccatgagctgattttcctgaaacactaaagagaaatgtcttttgtgctacagtttcgtagcatgagtttaaatcaagattatgatgagtaaatgtgtatgggttaaatcaaagataaggttatagtaacatcaaagattaggtgaggtttatagaaagatagatatccaggcttaccaaagtattaagtcaagaatataatatgtgatcagctttcaaagcatttacaagtgctgcaagttagtgaaacagctgtctccgtaaatggaggaaatgtggggaagccttggaatgcccttctggttctggcacattggaaagcacactcagaaggcttcatcaccaagattttgggagagtaaagcta

SEQ ID NO: 64 - DNA, 3922 bp, Homo sapiens
aagcttgctcttgcagccaaaagactaattgcaaaggcatcttctcagtgaagggggcggggtgggctagggctgagtggaaatggtgagagagattattgtagaaaatatctcttccgggaacttagggcaaagagttttattttcaggaatcacatccctgtctcccccaacctcagaccaggcccccaatctcctccccacaagaaaaagcaaaggcagtctgaaaacctgttgccaaaggaagggaacacttctgaaggaggaagttgagagtcttaggccaggtcttgaaggagggggtatcaattaagcagagactgattggaaggggacctaacgtgcctatgatagactcctttctgaggtttacctgtttttgtcgcgggcggtggcggggcgggtgcggtaatctagagaggtctgggttgtgtgagatattttgagttgaagaatctatttgactagtaaaaaagttgaactttaaagtggtagctttggggacagaggacatgggggttgcattgcaggagtcagcatggagcagggtgcttgtcacacagtttggatcttgtggtttcttacgcatggggccaaaataaacccaggtgaatggcctatgggagggagagagggaagggagcttgctagagccgaggtagagatgagttctttgagaaagagcgggcgtttgtgattgtgtagggggctgcccatagtggacatcctggtggatgtcctctgtccttaccatccttctcttctctctccagggtaacaagatgctcaactatagtgctcccagtgcagggggttgcctgctggacagaaaggcagtgggcacccctgctggtgggggcttccctcggaggcactcagtcaccctgcccagctccaagttccaccagaaccagctcctcagcagcctcaagggtgagccagcccccgctctgagctcgcgagacagccgcttccgagaccgctccttctcggaagggggcgagcggctgctgcccacccagaagcagcccgggggcggccaggtcaactccagccgctacaagacggagctgtgccgcccctttgaggaaaacggtgcctgtaagtacggggacaagtgccagttcgcacacggcatccacgagctccgcagcctgacccgccaccccaagtacaagacggagctgtgccgcaccttccacaccatcggcttttgcccctacgggccccgctgccacttcatccacaacgctgaagagcgccgtgccctggccggggcccgggacctctccgctgaccgtccccgcctccagcatagctttagctttgctgggtttcccagtgccgctgccaccgccgctgccaccgggctgctggacagccccacgtccatcaccccaccccctattctgagcgccgatgacctcctgggctcacctaccctgcccgatggcaccaataacccttttgccttctccagccaggagctggcaagcctctttgcccctagcatggggctgcccgggggtggctccccgaccaccttcctcttccggcccatgtccgagtcccctcacatgtttgactctccccccagccctcaggattctctctcggaccaggagggctacctgagcagctccagcagcagccacagtggctcagactccccgaccttggacaactcaagacgcctgcccatcttcagcagactttccatctcagatgactaagccagggtagggagggacctcctgcctactccagcccctaccctgcacccacatcccataccctcttctccctacccatcccattccccacaggccctacattaacaaggttaagctcaacccctttcccccagcacctcagaatgtgccctccctctccccctcataaccccacctaacataaggacaagtcaatttgtcagtagcttcttctggcttgaaaccccctccctggattttatagcccacttaccatgcataacagacaagtcccatattttgtcagtagatgcctttttttttcgcttaagccttaagtgccaaatcacaagagaaaaagcagtaacagtttacagaagcaacttagtgccttgtaatctaactttgtcactgtgactacattacctcttcagcgccagagggcacccgtgggcctcccggagcctctgcccatggcggggtggagacccggaaccagcagccccctccactggcgacacaactgcaccttccctcatttcagtctcccgcacacttattcctcctcccctcttcccggtggcacctctccacctgtaccgccccccaccccccccacccctgccccttggaagagttgttgccagaccagggttttgggggaaacctgtcttgacattcaaaacctttttcttcccgatctgaacccctgttgactaatcttgcctgggtttgtgtaggtctgcaggaaggaaggctgaaaaagcggacgaagattttgacttaagtggactttgtgatttaattttttcttttttttaagtggggaggaaggggaagctagatggactaggagagacttgattttggtgctaaagttccccagttcatatgtgacatctttttaaaaaaaataacaacaaaaaaaaaatgagagaaaagctaaaaaaaaaaaagtaaggggtgagcagttaatggtattcattccacatacaatatctgtgtaaaacgatttcctgtagaagtagctttaatggtttttgctctagaataccgtaggtctatccttagagcactcacgccatgctttcttccctgggttttaaacttcatataactttcagaaattggagagcaaaaattttgcttgtcactgcacatcaatataaaaaagcttatttaacttatcaaaacgtatttattgccaaactatgcttttttttgttaattttgttcatatttatcgggatgacaaatccatagaatatattcttttatgttaaattatgatcttcatattaatcttaaaattttgtgacgtgtctttttcctttttttccacagttttaatatattattcttcaacgacattttttgtaactttacacttttttggttattttattttaaaaaaatgaaaaattaatttaaaaaaatgcaaaaaactgttggattatttattttagaaattcccccctttgtgttggactgcaaattgagtttctttctctttaggcctttcacaactaggactgagaatgtatgtaaaagttctgtgacagtacagaaggaaaacaactttttatgtatagcttctaaaaggggaaaaaaaaaaaaaagagaaaccctttgacttccacgtgcccatctcaagacattccactcacagatttgaggttctggattccaggtctggagttttccaatgttaatgtaaacagaactggcacacacacattaagatgaatgtaattattattcctcttgctggtcactaccgtcgctttctatttctctttctttgtgtgaatttatttaaaagaaaaaaaactttttgtaacgactatttgcagtttaaaaatcaataaaccccgttttttcaagaaacattgatggtggagctggttttacttggttttggtttgactttgccagtaaggttctccccttgtataccttgcaagtcctggggagggggaggcggagagagagggctgtggctgtgggtggcggcatctctcatccctataagctaagcctatagctcccttccttgatgctggcagtttgctgcacttagaggggacggggtggaggttttctgcaaaggagcctgtacttcctgctgtattacttctgaaaagactgtgcagtgtgttagttgttggctgaatagcagcgggcccagccttgccgacacttgtgtggcc

SEQ ID NO: 65 - DNA, 3193 bp, Homo sapiens
aggttcagtggtcagagctatgtgcggtacagggccccagcggctcggaactggcacatccatttctatctgaaaacactccagccacaggccattcttctattcaccaatgaaacagcgtccgtctccctgaagctggccagtggagtgccccagctggaataccactgtctgggtggtttctatggaaacctttcctcccagcgccatgtgaatgaccacgagtggcactccatcctggtggaggagatggacgcttccattcgcctgatggttgacagcatgggcaacacctcccttgtggtcccagagaactgccgtggtctgaggcccgaaaggcacctcttgctgggcggcctcattctgttgcattcttcctcgaatgtctcccagggctttgaaggctgcctggatgctgtcgtggtcaacgaagaggctctagatctgctggcccctggcaagacggtggcaggcttgctggagacacaagccctcacccagtgctgcctccacagtgactactgcagccagaacacatgcctcaatggtgggaagtgctcatggacccacggggcaggctatgtctgcaaatgtcccccacagttctctgggaagcactgtgaacaaggaagggagaactgtacttttgcaccctgcctggaaggtggaacttgcatcctctcccccaaaggagcttcctgtaactgccctcatccttacacaggagacaggtgtgaaatggaggcgaggggttgttcagaaggacactgcctagtcactcccgagatccaaaggggggactgggggcagcaggagttactgatcatcacagtggccgtggcgttcattatcataagcactgtcgggcttctcttctactgccgccgttgcaagtctcacaagcctgtggccatggaggacccagacctcctggccaggagtgttggtgttgacacccaagccatgcctgccatcgagctcaacccattgagtgccagctcctgcaacaacctcaaccaactggaacccagcaaggcctctgttccaaatgaactcgtcacatttggacccaattctaagcaacggccagtggtctgcagtgtgccccccagactcccgccagctgcggtcccttcccactctgacaatgggcctgtcattaagagaacctggtccagtgaggagatggtgtaccctggcggagccatggtctggccccctacttactccaggaacgaacgctgggaatacccccactccgaagtgactcagggccctctgccgccctcggctcaccgccactcaaccccagtcgtgatgccagagcctaatggcctctatgggggcttccccttccccctggagatggaaaacaagcgggcacctctcccaccccgttacagcaaccagaacctggaagatctgatgccctctcggccccctagtccccgggagcgcctggttgccccctgtctcaatgagtacacggccatcagctactaccactcgcagttccggcagggagggggagggccctgcctggcagacgggggctacaagggggtgggtatgcgcctcagccgagctgggccctcttatgctgtctgtgaggtggagggggcacctcttgcaggccagggccagccccgggtgccccccaactatgagggctctgacatggtggagagtgattatggcagctgtgaggaggtcatgttctagcttcccattcccagagcaaggcaggcgggaggccaaggactggacttggcttatttcttcctgtctcgtagggggtgagttgagtgtggctgggagagtgggagggaagccctcagcccaggctgttgtcccttgaaatgtgctcttccaatcccccacctagtccctgagggtggagggaagctgaggatagagctccagaaacagcactagggtcccaggagaggggcatttctagagcagtgaccctggaaaaccaggaacaattgactcccggggtgggcgagagacaggagggctccctgatctgccggctctcagtccccggggcagagcctgattgactgtgctggctcaacttcaccaagatgcattctcatacctgcccacagctccattttggaggcaggcaggttggtgcctgacagacaaccactacgcgggccgtacagaggagctctagagggctgcgtggcatcctcctaggggctgagaggtgagcagcaggggagcgggcacagtcccctctgcccctgcctcagtcgagcactcactgtgtctttgtcaagtgtctgctccacgtcaggcactgtgctttgcaccggggagaaaatggtgatggagggcaacaaggactccgaggagcaccaccaggcctcgggccccagaggtcccactcctcagcctacacgcagaggaacgggcccacctcagagtcacaccactggctgccagtcagggcctgccaggagtctacacagctctgaaccttctttgttaaagaattcagacctcatggaactctgggttcttcatcccaagtttcccaggcacttttggccaaaggaaggaaggaactaattcttcattttaaaaattcttaggcactttttgaccttgctgtctggatgagtttcctcaatgggatttttcttccctagacacaaggaagtctgaactcctatttagggccggttggaagcagggagctggaccgcagtgtccaggctggacacctgccattgcctcctctccattgcagacgcctgcccatcaagtattactgcggcgactcaaccctatgcatggagggtcaatgtgggcacatgtctacacatgtgggtgcccatggatagtacgtgtgtacacatgtgtagagtgtatgtagccaggagtggtggggaccagaagcctctgtggcctttggtgacctcaccactccctcccacccagtccctccctctggtccactgccttttcatatgtgttgtttctggagacagaagtcaaaaggaagagcagtggagccttgcccacagggctgctgcttcatgcgagagggagatgtgtgggcgagagccaatttgtgtgagtggtttgtggctgtgtgtgtgactgtgagtgtgagtgacagatacatagtttcattggtcattttttttttaacaataaagtatctttttttactgtt

SEQ ID NO: 66 - DNA, 1548 bp, Homo sapiens
aatgaaatgtgtacagcttgccgtgttctgactgtacccttccctcttccatgtctgagaatctccgtgtattttaagaatgtgtgaggagagggtggcgattcatgtttcaatgagcctcttttttttttttccttcctgttttggtctatggctggtcttactctgtgtccatgttcggaagctctagttttgcatagaattatagagatgccaaactctttgaaaagagatccaaatttatcgcttgagagaaagaaaagaaacactattttttgtattttacctgagatacaggggcacaaatagatgagaattttacagtgttagtgtatgtatccctgagcctaaaaaatgaggatataaccttttacagagagagtgaggcgtggtggttttatatttatatatgaaaggccagcaagctcatgcgaaggatatacttttcttccaaaaagcggatttttttttttttaatgtttgaatctatatttgagatgggagtttggttggattaaacatgacaccccggtgggcggtgtgtgtgtctgttgcacatggcagggaggggagcctccttctcatggggttgccatggtgatcattggtttttccatcaaaattgcatcttcatccatagattaccttccccttccctgacagtccataaccaaacctttaaacagaacaacctctttaaaaacttctcttgtgtttaacactttcttcatgccaacgaaacagggtaaacatgctcaaaacattaacagtctaaacagatatccaaatactaagaagaaaaacaagttatagcactttcaattttttttttttttttaaaaaaaggtttatagctttttcttttcccatgtcacaatgtccacttcctaagaagggtttaaaatactatgaaaactttctttttggggaaaatatctatttggtgtttgacacatcagtaggtactttaaagacctgaattttatagtagctttaggagttatattttataaaaatcagttatgactttatatttccagacaatagagagttcagtacatcatgctcttgtgcctctgcctgcttttcctgcgttcccaccctgtattccccccgcctttcgggtttccagggcttcgagcttgatcttttgaaagttttattctattaaatttttgctatatcttctggttttctgaaaaagctttagaatggtttctataccctttgtatcactgcatttttccatatcatctccggttcgatcgcgtccagatggaaaacggaagcagaggcttctaatcgtcgcatttactggctccagtgcaacacatccatctgaaaacactcggaagtctggtgcttggagagggtgccattgtctcttgtacataaggtcatgacgtgtctatgtcaaaagttcttatatatttcttttataagctgaaagaaggtctatttttatgtttttaggtctatgaatggaacgttgtaaatgcttgtcaaacaataaaaataacgaaaagtgaaaaaaaaaaaaaaaaaaaa

SEQ ID NO: 67 - DNA, 749 bp, Homo sapiens
ctgcagcccgggggatccgcggccttatgggccctggttacggaagccgaggaaggctgagcgcgggctctcaaggaaagtagtcgcggaatctcagttagcggtggagaggcagtatgtccggttcaatggcgactgcggaagctagcggcagcgatgggaaagggcaggaagtcgagacctcagtcacctattaccggttggaggaggtggcaaagcgcaactccttgaaggaactgtggcttgtgatccatgggcgagtctacgatgtcacccgcttcctcaacgagcaccctggaggagaagaggttctgctggaacaagctggtgtagatgcaagtgaaagctttgaagatgtaggacactcttctgatgccagagaaatgctaaagcagtactacattggtgatatccatccgagtgaccttaaacctgaaagtggtagcaaggacccttcccaaaatgatacatgcaaaagttgctgggcatattggattttacccatcataggcgctgttctcttaggtttcctgtaccgctactacacatcggaaagcaaatcctcctgaggaagcccttgctgaagttagaaagtgcatccactttggggcgaaaactagagacttgcttgggggctgcagaagtgccctctcctcgaatcctgccagttgcattcttcccccttggagccaagacgattggccagacatcacctcagatctgagaccagcgtcttccatctcctcaga

SEQ ID NO: 68 - DNA, 9555 bp, Homo sapiens
gcagttatcatagagcacagtccctcacatcacacagctgcagagatgaataaacaaagaggaaccttctcagaagtgagtctggcccaggacccaaagccgcagcaaaggaaacctaaaggcaataaaagctccatttcaggaaccgaacaggaaatattccaagtagaattaaaccttcaaaatgcttctctgaatcatcaagggattgacaaaatatatgactgccaaggtaaaacattaaatatatcttcaatgttattgttctgggatgtgcagttgaatgcagaagggtgaggaaagattagggaatattttacacttgtgagaatcagagttcataaatgggatctaaaattctaatatgaaatcagaagactaattttattcaggcattgttcaactgtaatcaactgtaatctgcaatccactcatggaacattacatttactgaaaatgaaatggtatattctgagagaaagattactagagtagatgtagatttagaggccagagtttatcattatgtttccctgtgcatgtgggttctctagtatgtaattctctagtatgtaatcctaatcaactctctatctcccctctctcagtgcctctatttctctccctgcaggtttactgccacctccagagaagctcactgccgaggtcctaggaatcatttgcattgtcctgatggccactgtgttaaaaacaatagttcttattccttgtaagcatattcttgaaagattagaagggaacgttttactttaatgcttggaagtgcctcaaaatatttcatactgttgaagaatagaactcttattttactgtttctttcaaagatctattacttcatttatttttatagaaaaagttaattttattaaagattgtccccattttaaataacacacaaagtttcaaagtaagaaactaaactcattatggtttatctaaatattactttttataaaaatcattttaatttttctattacagtcctggagcagaacaattcttccccaaatacaagaacccagaaaagtacatttttattttcaaagttctgatattagtacaatttggaaccaaaataatatggttattctgaatttttcacaacataaataacaaaatcattgtagagaacatgtgtttattttttgtgtgtaatctatatatatgtatatacatacacacacaaagatattttctgatttcataattcaaaggcatgctatagaagaaaagtatttagaaaaacaaattaatttttgaaagtggttacatcaaatactacaagagatggtgaagttttgtgctaaagtctttaaaaatgtttatttcaaaggtctattactttatgtatttttatagaaaaagttaactttattaaagattctccccattttaaataacacacaaagtttcaaagtaagaaactaaactcgttatggtttatctagatatcagtttttaaaaaaatcattttaatttttctattacagtcctggagcagaacaattcttccccgaatacaagaacgcagaaaggtacatttttattttcaatgttctgatattagtacaatttatattttgtgtctgttttaaggcatgtaaaagaatagtggcatttttgcagaaaataagccataaaattcagccataaatatttataaacaaagattataaggcagcatttccttttctccagtaagtagaaatactcacttaaaatcattctaccctctttctcccaattaacagaagtctcttactgctgtgagatgataccaaataaataattttactatcctaaaaaagcagttgtgtatcagtgaggttcaagacatgtgtggagtgtatttttgtttgttggtttgctttatatgggaacacaattaggggagagaggctaacccttttctgtgtatgtgtgtatgactgactcagttattaaaaaatatatacttataagcctgtaaggatgcataaatatgttaagcacatatatgttcatactgttgcaaatatgtaaactaattttcatttttaaaaattcatattggtctagatagtaattcatatgtttattagcacgtccttgtggccattgtcctgaggagtggattacatattccaacagttgttactacattggtaaggaaagaagaacttgggaagagagtttgcaggcctgtgcttcaaagaactcttctagtctgctttctatagataatgaagaagaaatggtaagatgtaaatgtttcaaacattttatgaaaagcttctttcagtgaataatacatttgtagaaaacatccatatgtgtgtacatatatttagcttatatattttcaagtgtatgcattattcagttgattgacttaataatgtttttaaagttatataccgctaatgtacttttattttcagtttttgccttttatggaaaaccatgcttctattaatgctttgaatccacaataaattttactatttaattttattgagcatgatatgatctagtcatgcagattgatcacaaagtgaatgatctcatgtgatacaagtgagatcatgaaataagtttccagctctagcagttccacccctgtgtatgccctcatcacttatcctgactcctctccaaaacactgtcttgacttttgaagttataaataaggtttgcctgttcttgaatttataaaaaacggaattatacagtgtgaatttcatgtctgtctttttcactcctatctgatatttgtggaattcctccatattattgcggttatctgtagtttgttactgttcactgctgtactatgtacaaagaacactaagaattcattctgtcttatgtctctagatggggaagtgagtctcatgccctcaggggcaaagaggaccctggatggtgcattggtagtcgtggggtccctttcctgatcctcctcacccacaaccaccctggtgtctcctggtatgagaaggaagcactttctctagctccgtattggtggcaggtctcctggtagatcatccttgccagtggcaccagccttgcctggtattgtggaggggactctccttcgataccctcctcctattgccaggttgggtgtagggaaacagcaggcctaggtcaccttcttctgtcgtgtggaggacttaacatgctcgctcggacacttggttgatccctgatgctagggtcccagacaatttcatctttctctttccacctttcagagttctccattacttttgtctttcattaatcccagagtttatagttgtttttagtagggagtagcagagagagacgagtctacaccacctggccaggacccctgttattccacaaaaaccgaatcggataaaaattgagggcttatctagttaaagaatggtgtggtaccaaggaaacccaatctgtagcttccatgtcatttatttctgaatgacaacccctcaattcccttctaaatctccaactctgagaaatatagcacaaaaatagattgatttagtcacagtatctggagaaatgaatgcacagtatcaggaaacttattaaaacccttcctgtgtttattctgttaattggagtaactattacattgcaagaattaaaatgtctttattaacatgagaataagaatgaaagtactaagtataaacgttgaagagttcatttaaataaaaaattcaaacatttatgaaagtttttggcactgcaaatagtggttttcaactttaatatattgtttttgtaatgttttcataattattatttaagtgaaaattatttcttttcttttagaaatttctggccagcattttaccttcctcatggattggtgtgtttcgtaacagcagtcatcatccatgggtgacaataaatggtttggctttcaaacatgagtaagttgttttatagggtgctatataaaaaaatataaaggataaattcagaagaataatatgaataaatctatgtggaatcattgatatgaagaaagatgtggaaagttagtgaaatgttgatacaaatattttacaatagaccatagtagtccatatatgtccaccactcattggtcagctagtaactttcttggttatgagatggaccaggggtgtctaatctttggcttctgtgggccacattggaagaagaagagtcttgggccacacataaaagacactaacactaacgctagctgatgagctaaacaaaaaaattgcaaaaatatctcagaatgttttaagaaagcttatgtatttgtgttgggccgcattgaaagcttcctgggccacatgcggcccatgggccgtaagttagacaagcttgagatggactatcagggaattgcagtgcttgttttcattaaaaagtcacccttattttacttaagaatatcctcaaagcacaatagtagtgctgttggtatattgcttacaattttttattagtagttattgttgtcaatctcttattgtgcctaatttttaaattaaactttatcacagttatgaatgtgtagagaaaacataatctctctataggttctgtactatttcagacattcagtggggtcttgaaacatatcccccgtggatgaagggggagtactgtattgagtgttcagaataatgacttttagtaatagcatatgaaaaatttaattaccctttttcataaaattattttcttacagtacatggaaaatgcttttgtctcatgggtcatttgcataaaatgtaacagaattatggatttttctccattacaggataaaagactcagatcatgctgaacgtaactgtgcaatgctacatgtacgtggacttatatcagaccagtgtggatcttcaagaatcattgtgagcataagctttagaattaaagcgcttgagcttgcagtgcatcagataaaattttatatttgttcaaacagaaatgatattatgattgcataagccttaaaatgaattgtgttatttgctctaataataagaaaattccaaatcaattattgaaatataatacacacaattacggaagtacagataccctcgcatttaagtcaggctcattttgctgaacgtgatgtttgtggcattcaggcttcctaaaagttgcatgttatgttggtcagtttatatgaagtatcaagaacaagcaaaaccatggagacagaaaataaaatagcgttgctaatgcctaagggaggttgaaataggaggtgtccactaattgctagaatgtttctttgtgtcagtgatgaaaactttctaaatttcagtagcagtgatggttgtaactctgtgaatacactaaacatcactgatttttaatcattttaagtggatgaaatttatgctatgtgcaccgtacctcaatgaagctgtccaaaacaaaaatatatactgtcctgggattgcttgagtctgcatttaatctctaaagtaatttttaaagattagcttcttgacatttccatacaatatcatattgtgtccttcaatgtactgggttcaatgtatggggttttctttaatttctctctatcatattatgtattttgggggtttgaatcatacagaaatgcagatattttacattcatgcttttgtaaatagcattctgattttaatattccctttaataacttttgttactgtaaatagaaatacaactgatgtctgcattttcacttattttacatatttaaatctatcatttcaaacagatttttctggattttctatataaacagcaattttattttcttttctttttctttttttttctttttttattattattatactttaagttttagggtacatgtgcacaatgtgcaggtttgttacatatgtatacatgtgccatgttggtgtgctgcacccattaactcgtcatttagcattaggtatatctcctaatgctatccctcccccctccccccaccccacaacagtcccctgtgtgtgatgttcccctgcctgtgtcctgcaaataatcacacttttattttttctatccatgtgccacaacttattttttcttcatttattttctctggctagtactttatatccagagttgaatagaaggtacaatcaaattttacatgtatcatatgtatcattttctggttttggcaaaaaataattcaacatattattcatatttacaaagtttggtgtttttttcatcatatctttcttatattgaagtggttttataatattccttttttcaatagatgttatcaattgtaacatttttattttttattacttagaatgatatatgttttctttatacaacattttataaaataattttatttttgtcaaatgttaaactaggctttgtttccgaaacaaatccatgctgatcattgtatattgccccttataaaatatcagtgcacatactactatatctagggtaagatatgtttcttcatctatgttcacaaggatatttgaccacgtttttatttgtagctatgtacttgaaaaagttttggtctcaaggctatcttgggaagattttctgtttctctataacctggaagcatttgttaagagtactgctttaaccataaaaaaggatgagttcatgtcctctgcagggacatggatgaagctggaaaccatcattctcagcaaactatcacaaggacagaaaaccaaacaccgcatgttctcactcataggtgggaattgaacaatgagaacacatggacacagggaggagaacatcacacaccggggcctgtcggggggtggggggttgggggagggatagcattaggagaaatacctaatgtaaatgatgagttgatgggtgcagcacaccaacatggcacatctatgcctatgtaacaaacctgcacgttgtgcacatataccctagaacttaaaatataataataataataaagagtaccgctttatttttaaatgttatcattcactagttatgccatctgagtttgcaggctatttttgtagaaaagtttatggctaaactgaatttcttcaatacatgtagggtttactcagatttctatttgaggtactatattttggtaatgagcatttcccaggaattttctatttcatatggacattaaaatgcattgataatatagttttattgcctgtttaataactgtaaagaccataatggtattgccatgtttaaactgggaataaaatatctgtgccttttcaaaatcttcccttagtagtcctttgtgaccattcatcttgataatttctttggcccatatgttattttgacatatattactgaattaaaaaccatataaggttctcagatttttgtttattgacttctgttgtaggtaaaatatagttagaacattttctattaaactggaaatgttcttcatccctttataaatgtggctcatgtggtgaggtactggttttaaatgttatttatttttattaattaatgttaaatttgaatagctacatttcaactgtctcctagccaagcttggctagcggtactacattgaaattgagtatccgtgtgagtatatgtgtgtgaatgcattcatatgagtgatggttacttgtctagtttaaatctttctataggctcactggcctgtcttgtattaagcatcaagagaagagtctttaaaaatcccatttatgattgtttacttgttcactttattcaattatatgttgaacttgtatcattaggtatatgcaatgataaaaaatatattactaatggtttggaaaattaatttatcattatgaagtatatttccccaatttcagtaaatttcatctcggctcactgcagcctcgacctcacctccaaggctcaagcgatcctcccacctcagcaaccagagtagctggctacaggccaataccatcatgctggctaattttcgtatttttttgtagagacggggtttcatcatgttgaccaggctggtcttgaactcctgagctcaagaaatcaacacatcttggcctcccaagttgctgggattactgacacaagccaccgcccctgagtgctcatgtaccatttagcttgtgttttaaaaatctactttttctgccctccctatttttaactagatgatgttttaaaaattacttttccctctctatatagtttgatttaagcattagtcatttacaacaaatattaatattaaaatgcagaccgttatgattggaaaataaatcaatgaacaatataatgagtggtttttatatatttcaatctctggcgtggtgatatagtacaatattttttaattatttattcttcccagagacatatatttcaatgagagttatctgattaatttatttttaaaaaactgaatgagagaattttaagaactatcaagaaagtaagttgggaatttaactttgagaattgatgtcaattacaatgaagtggaaatgtattttctcagaataattagtgacaaatacattaaattcctattggtaagattattattttaaaaatttatcgtcatattagcagtgatattataggggtatatgataaagaagtacgtaatcccaagttttagccaccctgtgtaaatgtagaagttaaacatgtaagagactctgaaaaaggtataagattttagtgtttgtgattgagatggaaacaactgcatgggtagtagtctttgttctccccaaatcttgtttactataaaaataatttctaaaagtcacttgaaaatggacaaactaaatgacaccctagcagctcagtctcttatattctgaggtgtatgatgagataaactgattcaaaatggccctagtgtgaaaacttcctgttcaaatccgaagtgatacattgatgaggaatctgctttttgcactcttgcctcactctgagctttcacagggcagtctgtgaagatcagagatatctgttttttgttttttgtttttttctgagacagagtctcgctctgtcgcccaggctggagtgcagtggctcccgatctcagctcactgcaagtacgcctcccgggttcaaccgttctcctgcctcagcctcccaagcagctacaggcgcccgccaccacacccggctaagtttttgtatttttagtagagacggggtttcaccggatcacagatgtcttttgtgtcgttaagaggtaacctgacctctccactaaggggcgtgtgactttctgatgacagaaggtatgtgttgctagtctcctgtttctctactagctcatctcctttagtagaaaattgtaaatattaaatgtgatgcaacaaggtaaagttaatacagaataaaatcaaagtagaactgtctgtacatgaataattcagggtgaaaagcaacccaaaatataatatatgtttgaggatttcttaaagtatttacattattgcctgtggagaattagtcaagcacatgcatacatcataataggtttgttaatcaatataatttagagtgaaaccgataaat

SEQ ID NO: 69 - DNA, 1342 bp, Homo sapiens
tatctgggtcccccccactggatgggacctctttgaggctggggactgagtcttttcatcttcgggtgtcctgaatggccttgctaatcagaggggtccctgggcgggcagcatcagcatcacgttggagctcgctagcgatgcagaatttccagctctccagggacctactgcatgggaatctgcattttatcaaggtttcctggcgcatatttgaagttgcgaagctccacccggcagcgcatgggtagctgcaaggggtggctgctcagtgacgccgggttgagggacagaaggaaagttgctggctgcgggctcctccatgctcttctcctctctccccagtgcaagatgtctctgaacgggcagcgtggggagtgctggtgtgtgaaccccaacaccgggaagctgatccagggagcccccaccatccggggggaccccgagtgtcatctcttctacaatgagcagcaggaggctcgcggggtgcacacccagcggatgcagtagaccgcagccagccggtgcctggcgcccctgccccccgcccctctccaaacaccggcagaaaacggagagtgcttgggtggtgggtgctggaggattttccagttctgacacacgtatttatatttggaaagagaccagcaccgagctcggcacctccccggcctctctcttcccagctgcagatgccacacctgctccttcttgctttccccgggggaggaagggggttgtggtcggggagctggggtacaggtttggggagggggaagagaaatttttatttttgaacccctgtgtcccttttgcataagattaaaggaaggaaaagtaaagtgtgtgtcttttgcctgagtctttggggtcttccagggagagatgcagagcctggcctaggttggcctacccgccatcatccagctttgcccctggctcctaggaaaatgggaaaggccgtttccgtttcccattcatgaaatggcaataagaaggaatgggaacctcctgaatccagatcaaaccctccagtgcagccccaggactcccaggtgaggcttctgccccatgtggcccctgcctggcgctgtacaggggcaggatgagtcacgggctggggatggggagatgtggagcgtgggtccggcttcctccctcgcacattcagataacactgcagtgggagataaggaacaggaaacgttgggattggggttgtctggcccctgaaataaaggaggctccctcctgcccagggtgagacatttccactcagcccccaaagaaagggagtagggctgtggttaactggcttattcataaggatgacaccactgag

SEQ ID NO: 70 - DNA, 1769 bp, Homo sapiens
cctcactgactataaaagaatagagaaggaagggcttcagtgaccggctgcctggctgacttacagcagtcagactctgacaggatcatggctatgatggaggtccaggggggacccagcctgggacagacctgcgtgctgatcgtgatcttcacagtgctcctgcagtctctctgtgtggctgtaacttacgtgtactttaccaacgagctgaagcagatgcaggacaagtactccaaaagtggcattgcttgtttcttaaaagaagatgacagttattgggaccccaatgacgaagagagtatgaacagcccctgctggcaagtcaagtggcaactccgtcagctcgttagaaagatgattttgagaacctctgaggaaaccatttctacagttcaagaaaagcaacaaaatatttctcccctagtgagagaaagaggtcctcagagagtagcagctcacataactgggaccagaggaagaagcaacacattgtcttctccaaactccaagaatgaaaaggctctgggccgcaaaataaactcctgggaatcatcaaggagtgggcattcattcctgagcaacttgcacttgaggaatggtgaactggtcatccatgaaaaagggttttactacatctattcccaaacatactttcgatttcaggaggaaataaaagaaaacacaaagaacgacaaacaaatggtccaatatatttacaaatacacaagttatcctgaccctatattgttgatgaaaagtgctagaaatagttgttggtctaaagatgcagaatatggactctattccatctatcaagggggaatatttgagcttaaggaaaatgacagaatttttgtttctgtaacaaatgagcacttgatagacatggaccatgaagccagttttttcggggcctttttagttggctaactgacctggaaagaaaaagcaataacctcaaagtgactattcagttttcaggatgatacactatgaagatgtttcaaaaaatctgaccaaaacaaacaaacagaaaacagaaaacaaaaaaacctctatgcaatctgagtagagcagccacaaccaaaaaattctacaacacacactgttctgaaagtgactcacttatcccaagaaaatgaaattgctgaaagatctttcaggactctacctcatatcagtttgctagcagaaatctagaagactgtcagcttccaaacattaatgcaatggttaacatcttctgtctttataatctactccttgtaaagactgtagaagaaagcgcaacaatccatctctcaagtagtgtatcacagtagtagcctccaggtttccttaagggacaacatccttaagtcaaaagagagaagaggcaccactaaaagatcgcagtttgcctggtgcagtggctcacacctgtaatcccaacattttgggaacccaaggtgggtagatcacgagatcaagagatcaagaccatagtgaccaacatagtgaaaccccatctctactgaaagtgcaaaaattagctgggtgtgttggcacatgcctgtagtcccagctacttgagaggctgaggcaggagaatcgtttgaacccgggaggcagaggttgcagtgtggtgagatcatgccactacactccagcctggcgacagagcgagacttggtttcaaaaaaaaaaaaaaaaaaaaacttcagtaagtacgtgttatttttttcaataaaattctattacagtatgtcaaaaaaaaaaaaaaaaaa

SEQ ID NO: 71 - DNA, 34875 bp, Homo sapiens
gatccgcctgcctcggcctcccaaagtgctgggattacaggcgtgagcgaccacacccagtcctctctctcatattctttaacacacaatgattaattactaaaatgaagactcttgttttctgaagggaaaaagaaatatttgacaaccagctccttgaagagcggaaccggcgccgtcggtgagggagcagccggctgtgctgtcagcggggcctggcggtggaagcgcctccagtgtgcatgagcgtgtctgaagatggggggctcagggggcacgtttgcgtttggacctgtctgtgcgttctcctgcgtggcagtcctgatttccatgcttctggagaatccatttcgttaacactgaaagccagttctcttttcctggcagtttttttcattttatttttggcattttttacaagataccgttcgggaaaggcttttgaaaggacggaagcgtattcactgtgcgccagtactcctggctgtgctgtggtttctcccgacgtgcacatcgatctcgtatgtgtggcatctgatattaaacgggaggttttaagaagcgtctgccgtgatcatggagcttcggaagcgggaatggttcttccgggtttgctgttttgtctgtttcccccttgtgtggtttccgcctgcgacagttccagaatttgctctcccactcagtgtgctctgcagctgtgaggaaacagccttcgttagaggcgggagcagagacgagccgctgctctgtgtcgtgtttgctgtggccgcagggagaggagcaggacacgcacctttccaggggcctctgtgtcccgcactgtgtgtgagtggaccgcagcgcgcagccacatgccctggctgccatgggccagaccgcctccacctcccccgcccgcctggcctgtcctgagtgcatttccctgcactgtgtcgtcactgcacagccagtcaccgcggtctcagtcatcggcgcggatggctatgctggggtcccagggtggccgcagcagtcagggtcactgtgggagccctggggtggagtgacaaaccgcattgtcctgtgcccgccatggcagaagcgcagcctttgtatggaggcccaaccgcgctcccgtctggagaagcggcttccggggtgtggctgccgggtcggctctggtccacagcacggtgccggggctgcaggttgttgagggctgtgactccgtggggctcagccaggctccagcagggtcagacgtgctgttaagagcaaagccacagacgatgacttgtccattctcagtggatgctccaggctgtgcctacacagcagtgctggtgacatgtccagggttccagggcccggtggcctgggagctgctttctccccactggctgggctgcatctggccctggctggaggccttgctttgaggggctgtgaccctcttcccccaggccctccccagccgacgacagccaccggagaggagatcggaacacgattgtctcagatgcagggcgctgtgcgggacgaagccgcaaggactctcgtatcgggcccttgggactcgggaggtgccagaggcggcggctgctctggacctcggtgttcactgacctttgtttcacttgcctctgctcgactccgagagcaggaaacccggccgtggcctggcagctccgcctcccatgcccgcacgctggggtctgtcttgtctggagcagtggggcacaccccggaggaggcgggggtcagggctgtcggccttggccccctgctggtcgctgtttcggggactcggggcggccagtaccaccgcctgaggcggggctcagcagcgttgcatgtacgggcctcgtactgcctcatggaaaatcctccggagccgccctccattgtgggttcctgagagtaggacacattgccatggttttgtgggaatcacgcgcccctgatggaacttttctgctgttgtgaagtacttttatccatttgcttctctgctgaccttgccaagttgttcgaggtggaattaaacacctcccagacctctggcttgtcttttctgaacccccaaacacatcccactgcatgggttgtccaagcttggaaatgggagagtgaccctgccatccccagggacatggcctggccttggggtggattcccacctcactggcgggcctagggtgctgtttaaacagcagccagaggctgggcgcggtggctcacgcctgcaatcccagcactttgggaggccaaggcaggtggataacctgaggttagaagttcgagaccagcctggccaacatggtaaaacctcatctctgctaaaaaaaattagcgagcatggtggtgggcgcctgtagtcctagcacctggggaggctgaggcaggagaattgcttgaacccgggaggcagaggttgcagtgagccgagatcacgccactgcactccagcctggccacacagtgagactccgtctcaaaaaaataaacagcagccaggggcctcactggggttcatgcctgtggccccagctactggggaggcttagatgggaggaacacttgtttggaggtcaaggctgcggctccagtgagccgagatcacgccactgcactccagccggaatgacgatgagcacctgtgttgcagcatagccctgcccagcaggtggaaccagaatgtgccagaggcccccttgtgcgtcccaccccgcctgcaccctctgcccttactgtcctgtgggctctgagggtgtcaaggccgctgggacaggccctgcctgggtgcttccctcagtaatggggggtcgtgggtgctctgggttgtcagccgggcagttgagtgggagtcaggggtgctgacctcacaggcacggccagtgaggagcattccggggccctgaggatgccagcatgggtggtcctgggctcgccctctccacagcatggctggcgttcctcgactgccgccggagccccgggaagacaggcttgaccccgtgcacacacgcagggagacgccaggagccctgccctcagaagcctgcacgctttgcctctcttctggcagctagctaaccctgcatccccacctgagcctgtccctggcactgaggacactggacctgtgtcactggggtggggtgtcctgggtcctgctgggtgctgagtgtctccatgccaggagctcccgcctctaccatcgagatgaccacagatgtccccagacgtggcctggtgctccgtggaaaactgctgtccacaaaccatggcgtccttcccctgacccccgccccttccctctctggcttggcccagcgggtgtctcagaacctgggtgcgtgcttctgccagccccccaaccacctggcccacactccccaacccccttcactgagccgcagagacccccatgtccctgccaatgctttttccgaagccggtctcacttgttcccgccctggcagtgtgaggggaattggggtcccccctcagtggcacagctgtgcctgtctgatgacttccaccaagcccccttcactgagctgcagagacccccatgtccctgccagtgctttttccgaagccagtctcacttgttcccagcagtgtgaggggaattgaggttccccctcagtggcacagctgtgcctgtcggatcacttccaacaaggtggccttggtggccgcacggggcacttcgtccatcttaaaggggcaacacaggcatgcagcgagaattccaaaccacagaaacctcactctcatgggccccactgcctgaggcattttctgttttgcttttgttggtgggttggttggttggttggttggtttgagacagggtctggctctgttgcccaggctggagtacagtggtgcaaacgtggctcactgcagccttgacctccctggctcaagcgatcctcccacttcagcctcccaagaagctgggaccacaggtgtgcaccaccatgcccggctaatttttgtgcttcttgtagaaatggtgcttgctgtgtttccgaggctaagtgatcctcatcggcctccaaagtgctgagattataggcgagagccactgcagctggcctgcctgagttcttgtgcctctctgcctccctccctgtgccagcctcacgccccctcctcaccttccccaattcctactctcaccccgccctgggtccttcccctctcactggcctgagctgtttctggaactgctgcctgccctctgctcatgtcctgcctctgccccgtgaaaccagctcctccatgttccctgtctcaggggtgtcctccagggcccggagttcctgaaccagattcttctccccacctacctcacctttctgtccagtccgcctatcagtcagccccctttgcagcagaatgccaccccaaaacccagcgcctggaacattctccacacagtttctgtggggccgggatctaagggcagcccggccaggggcttctagggtggctcgtggggctgcagtccacatgctggttggggccacatcatcagaaggctccaacggggctgggggtctgaggagcctcgctgggggcagcagcccaggagccacagcagccgcccatgaatatcaccgccattctgttggtcacacagagcagccccggttgaacgtgaagaccctataggggctgggcttggtggctcacacctgtaatcccagaactctgggaggccaaggtgggcagatcacctgaggtcagaagtttgagcccagcctggccaacatggtgaaaccccatctctactaaaaatacaaaaattagccgggtgtggtggtggatgcgtgtaatctcagctactcaggaggctgaagcaggacaattgcttaaacccaggaggcagaggttgcagtgagctgagattgtgccattgcactccagcctgggggacagagcgagactccgtctcaaaaaaagaaaaaagaccccataggaaggcaagagcctgaacagcaaacgcaagcccaggagccctgtcatcccagcggccagaggaccatcccccttggctcccactgaactcagctgcagtccccaccccatcccccaccaccactagggctaagagccagcagaaatccttgggctggcttcattgttcctcccgggaagagtccagggcagctgacacatgatcccagcatggcacgccggggacaggggaggcactctgctgtccctgactgtatttaaaaaaaaaaaatccacaagcaaaatccctaatgagcaatgttccacagtaagtcctgcctcagaactgtgcaggcatcagaaacaggaatgcctgagaaacggccacggtcccaggagctgaggaaacaccacgcctgatgccacgtagggtcctggatggagccctaggccaggaaagggcattagaggaaacccaggaaacttggatagagtgtagattttggtcagtaataatgtatcatgtgacaaatgtatcacactcatgaactgggcatggggtactcacaactctaaattattctaaaaatattgatataaatttaagaccaaaaccatggccaggcgtggtgcctcactcctgaatcccagcactctgggaggccgaggtgggcagatcacctgaggtcaggagttcgagaccagcctggccaacaaaccctgtctctattcaaaatacaaaaactagccgggcatcgtagtgtgtgcatgtaatcccagctactcaggaggctgaggcaggagaatcacttgatccagggaggtggaggctgcagtgagctgagatcttgccactgtactccagcctgggtgacagagcaagactccatctcaaaaaataaataaataaaaataaaaccaaaaccctacagcacgggcagctatgagaactagagaaggaagagggttttgtgcacctgccagcctcttaggttcttgtcagcttttcccccaagtctttattattattatgtattgtagagatggggtcttgctatgttgcccagactggtctcaagctcctggcttcaagtgatcctcctgcctcggcttcctaaagtgctgggattgcaggtgtgagccaccatgctgggcccctccaatccttttgagctgcccaagaacagagaccaggcctggctttgctcagcagtgggtccccagcccatggcacgaattcagtaaacacttgttgtggtcctcaaggggcccccagtcttgctagtcacctgtgttcacctaatttgagcctctgttttctttactttttctttttcttttttcttttttttttttttttgagatggagtctcactctgtcgcccaggctggagtgcggtggcacgatctcagctcattgcaacctccgcttcccggattcaagtgattctcttgcctcagcctcccgagtagctgggatttagatacagggtttcaccatattggccaggttggttttgaactcctgacctcaggtgatttgcctgcctcagcctcccaaagtgctgggattacaggcgtgaaccaccgcaccggcctttgcctctgtttttgtaatcataaaacaggcagacaaaacctccagtggaattgtgaaaattaaatgatatgcatgcagaaagcgttctgcaaactctgttttgctagtttgggtgtttagtgttagtttttatatcattagtactggttgtaaacttatcaatttaagcaagatggaaaatcgagggtgtgtcagggaagggggaagtttgagctgaaattatgacctcttaggggtgggaagaggaggctttggggttgtgaggtctgagcccccttactttgggatgagtccacatcgcggcgactcctctgcagaatgcggtgatgttgcggtaaggggtccgggatagctgcgaggcagctggaccaatcctgaacgaaagacatcagtgatcgcaagaggcgctaaaacttctgccgaaacccgggatcgaaccagggacctttagatcttcagtctaacgctctcccaactgagctatttcggctgggcggcagagtcgctctcgccgggactccgtcccgcgctgcgccttccctgcgcaggcgcagtcgtttcgcgtcagcaggccccacatcctttgtaaggtctcccagggcgccggagcgcagtgtcgtctctgtggcgcaatcggttagcgcgttcggctgttaaccgaaaggttggtggttcgagcccacccagggacgcgtggtgacttttgccctcctggaataacaagaaaatgagtgtcgcctctgtttttgtcggtccgccgcagacccgcggcccccacgtgcgcactccgatgacctttccgcctcgggtgatctgggggtgcacggcgcaacacgaccacggaggccgaaagcgcagcggaacctcccggctccaggttccggtttccgcatgcgctccgagccgctttgggcggcggccccgggaacccggagcgctaaggagaacggacctcagaggttgtctgaaggccgaggccaagatggcggtgctgtcaggtgagcgcggcaccggcggcgggtgtggggccgcgcgggtctggggccgtgggagcctcgggtgtcgtggtggcgtcgggggtcggtgccggcgtcgtggccgcggtcctctccgggcttctccgagccggccgctcctcgggctccccgcccggcttgcgatgaacggtcgccgttattgcgtccagagtacagtcggggaaaccgaggcccggtaggtcatgacgcaagcctccagcctcaggaaggcgctcggggtggaggctggaggggccccattcacgtccccgagaccagggcacggcccgcgaggctgctcttgagatgccctggagagagcggggcctgcctgacaggctgggaaactgaggcccattgagggtcttcgaggtcacagggccgggcctgggaaggaacaggacccaggacatccacgccaccctgctggaccctccacctccctccccacccctgggaggtaagggcctctcgcagagcctgtcctgctccagggacttttttgggatcagctgaagcctgcggacctctgctcagataaagttattaaatgcatggaataaaatccatagaattgcaaggaaatcagttacacggagaggcagttattaaaagattgtcttgaaacctgattggcgacttagtaatctaagtgcttcccttatgaacgcgatctagcggcaggtctaattgcgactgtgatttggaaggagtgaggagtggaaatgaggctttgatgatacggaaacgtctgcagcccctgcaccatagctaggaaacatctgtgattccgcttggtgaaaagttacaggtcctgctaatactgccgtattttgttgtctatgctaagaattttttatttatttattaagacagggtctgcctctgtcgctcagactggagtgcagtggtgccatcttggctcatcactgcaacctgtgcctcccaggctcaagcgattctggcacttcagtgtcctgtgtagctgggaccacaggtgtgcgccaccatgcctggctagtttttgtatttttagtagagatgggggtcttgccctgttgcccaggctggtctcgaacttctgagttcaagcaatcctcccacctgagcctcccaaagtgctgggagccacggcacccagcctacgctaagaattgaatgaagggctaattttccataagatgctggtgacaacaaagacatatatatttttttattccaagcaaattcacagttctgaatcctcaccaggccccttgttaagaatgcctggcccacgcgcggtggctcacgcctgtaatcccagcactttggaaggccaaggtgggcggatcacctgaggtccggagttcgagaccagcctggccaacatggagaaaccccgtctctactaaaaatacaaaatcagctgggtgtggtggcgcatgcctgtaatcgcagctactggggggctggggcaagagaatcgcttgaacccgggaggcggaggttgcagtgagctaagattgcaccattgcactccatcctgggcaacaagagtgaaactccgtctcaaaaacaaaaacaaaaacaaaccagctgggcgtggtggctcaggcctgtaatcccagcactttgggaggccgaggtgggcggatcccctgagttcgggagttcaagaccagcctgatcaacatggagaaaccctgtctctactaaaaaatgcaaaattagctgagcgtggtagcaggcgcctgtaatcccagctactcgggaggctgaggcaggagaatagcttgaacctgggaggtggaggttgcagtgagccaagattgtgccgttgcactccagcctgggtgacaagagcgaaactccgtctcaaaacaacaacaacaacaacaaaaaccctgacccagaggcacagaatcccatcacctcagaggttctcagaagagtatctcctctgctaggagctcatccaaagtcctgcattttcagcttgggaaactgacacctggagtggggcagctcccaccagagcctggggctgggcagttagcctgtctgctgtgcccagcctcaggcatgccaagaagtaggtcacaggcttgtgtccttcagagagttgtggcctggacggggccatgggaaacagcaaccccggatgaggctaaggctggggtgagggaggggctcagaggcaggagaaggccccatggatcgctgcattcaggggcatcaaaccctggccctggcccctggaggctgcccacagcctctccatcgggcctcacctcacccacagcgacaaagtaccatcacctgggcagcttcaacagaagctgattgttctcacagttctgggggctggaaggccaagattgggggtcagcagggttggttcctgctgaggcctctgtccttggcttgcccgtggccatcttctccctgcgtctttcctctgtacatgtttgtgtcctgatcgccttttcttacaaggacataagtcatatcggatgagggcccaccctcgtgacctcactgtcctttataatgaccctttattttattttttgagatggagtctccctctgtcacccaagctggagtgcagtggcgcagcctctgctcactgcaacctctacctcccgggttcaagtgattctcctgcctcagcctctcgagtagctgggattacaggtacctgctactacacccagctaatttttgtatttttagtagagacggggtttcaccatgttgcccaggctggtctcgaactcctgacctcaggtgatccacctgcctcggcctcctgaagtgctggaattacaggcatgagccaccacgcccaggcattaatgatccctttaaagaccccatctccaaaagcagtcacattctgaggtcctggggttagggcttcagatgcaggtcgggtggagggtcacagttcagccgtcaccagcaccaagcctgcctttctggattcttccttgtgagccaggattcctggcacctccaggtttcctcccgctgagtgccccgggcgtggcaaggccctgctctggccttagtcttcgcctcgggaaggctctcccaggagacttcgtgcaggcgcgttccctcctctgcgcttcctttgaggctggctcctctaggggtgcttttctgtgtagattgacgtgggcagcgccctccccgcttagcggactgcagattcctgcaggatggggcctgtgctcagctgcgtgggaaacgcccgagcagcagccagggcctggagcacccagcacacgcttgtcaggcacagctgaggccaggacgagcactgggtgcccagggaggccccagcattgctggagtggcaggcaccccacaagcacgcatagatggagatagaaccgggtgccggcaaccggaggacctggggtcctggtgtaggcgggacgccccgggtatctgaactgaaacctgcctcatgagaaggggccagcagtgtgcaagtgtgaggcggggtgtcccccgcagggcagcagccagtgtgcaagtgtgaggcggggtgtcccccacagggcagcagccagtgcgggggccctggcgcaggaaagcggcaggtgccagtgaagatcgccagggcggggagacggggcagcgtttgggttccttccggggccatgcagtctcaagcaggggactaagactctctcgtgttctgaaaaccccctcgttacctaacgtttgttaagtggcactcgagttgggatcagagctaggctgtgcgggcaggagcctgatggggaagcgcctggaggccggccctgcgtgctgcccgcagctcactgttcccaccccgtggtcctctctgcagctcctggcctgcgcggcttccggatccttggtctgcggtgagtgcctgagtctccagccctcagctgggaggggccttcagcagcgacagacgaacggggcggggggggtggggggtggggggagcgccttgttgaaggtcacgtgtcatgttagggacaggatgcaggtgacggtctgcacgctgcccgtgatgtgccgggaccctccctgggacagtccacgcagtggcaaaggctggacagtcaggaggaaaaccctgtgggcccggctcagtgccgtcagagctcaccgccacctggggtgggaaggcattctctgagccctgtgcagatggcagctggggcaggcctcctgcagacccaggtgactgacagggcggtgagggcgcatgcccagggatcttaccttggtcatgtgtggagggcctgctgccagtttccttctgtggatgatcctgggaccgtccttgcttggacactgttgacctgctgggtacgtcacaaaagaagttccattcaagtctgggccatcattgggggtcggggcgatggccgcatggctccagcggctctggccagtggcccaagtgttgacaggcagaggtgagaacagtctcgcagcagggaggggagaggcaggacaacagtgagtgcggctgggggagctggaggggcctgggacagccactgacccgcgttccatctcccggcagctccagcgtgggcccggctgtgcaggcacgaggtgtccatcagagcgtggccaccgatggcccaagcaggtgaagctggccttctgggggaggtcgtaccccctcgccccacccccatcccttccttattttctgcatcagtgccgcagccactgaggtgcatggatggggcagggagggggtcacacatcccagtccctgacctcatgtgggtccaggcctctggcagcggccgtgggggctcgcatccgcctctgggaagcacctgcgtggctgacgcctcctgtgcccgtgtgtctctgtgccagcacccagcctgccctgccaaaggccagagccgtggctcccaaacccagcagccggggcgagtatgtggtggccaagctggatgacctcgtcaactgggcccgccgggtgagtactatgagctgtaggccctcctcgagcgccagggcctctctgcacactcacaggcacacacatacacacaccaacgtgcagacacgtacacacacaacacatgcatgcacactcacatgcgcacatgtgcatgcaagctcacatgtatggacagatgtgtacacggaccacacgcacactcacgcacacaatgcacatatgcacactcgcacacatgcacacttgcacacacatgcacacacaagcacatgtgcacacacgcttgcacacatacacacatgcacacttgcactcatgcacactcatgcgcacatatacacatgcacacgcacactcgcacacacgtgcacatatatgcacagtcatgcacacacatgcacactcacacacatgcacacacgtccttgtgtggacacatgcatgtgtgcctgttggcatgcatgcacacaggcacactcactgatgcacacacacccctgcggccgtggagcagggcggaccctcccggaggcccctgtgctggcctggtggcctgtggttccatctgaggattcggaccctgctggagatgacccctccgtttccgtcattctctttctggcgtccgtgtgttcctcttgtttctcttttaaggtgaaagcagtgttttaagttaaaaggagcgcgtgtgaaggcagtagatccttctcggtacccgtttaaagcctcccctgcctgtggcgccagcccccacgcagcccctgccatccccctgcagcgtgagcacgtgcagctccctccagctcctgcggcacttgctgcgacagcccgggttcaacaatcccccattgatggacgttcactgtttccttttgttttttgtttcctaaacaatgccacggcgaacgtcctgccagggccgcagtggtcgagacaaggatagtttttaatgcaggatagttcttttctttttcttttcttttcttttttttttttttgagacggaggctcgctctgtcgcccaggctggagtgcagtggtgcgatctcggctcactgcatgctccgcttgccgggttctcctgcctcagcctcctaagtagctgggactacaggtgcccgccaccacgcccggctaattttttgtatttttatttttagtagagatggggtttcaccgtgttggccaggatggtctcgatctcctgacctcgtgatccgcccacctcggcctcccaaagtgctgggattacaggcgtgagccaccacgcccggctaatgcaggatagtttctaatggagggaacctgagacatggccagcggccgtcccaacacaggcttctggcgggcaggtggacctggccatttctgcccgggcagccctgcctcactctgtagcctgaccctgtcacccgccaacacatgcagcagggcccctgccaggtctcagagccgcgtgcagggagagcgggaacggtgggggaaatgagaagccacagggatggaggagaggggagggagtggccaaggagatctgagagggcttcctggaggcgtcgcacttggtatgtggacccagatctagttaacgcagagagttcccggttagacctgcgctactactcgcctgtagcccacgcgctcagagagtggctggagccccctgttgaaatggtgggacttaggatacactgggttcgaggaactatgtgatgaggacagatctcacccgtttctctctattttatgtatttgaatgtggctggtggggcgcgctttacaactcttggggcccggaggccacctgcaggagccgctgtgcctctcacctctgccggctgccgccccgggacatgagtcgggggttctgggtgctccacgtggagtctcacgctgggccacgcggggctccgggggtggcgtctgacccgagcccggcctccgcagagttctctgtggcccatgaccttcggcctggcctgctgcgccgtggagatgatgcacatggcagcaccccgctacgacatggaccgctttggcgtggtcttccgcgccagcccgcgccagtccgacgtcatgatcgtggccggcacactcaccaacaagatggccccagcgcttcgcaaggtaggcctcgtcccagccgcccagccgcccccagagtgagctgcgcacggaccccgcctctcttccaggtctacgaccagatgccggagccgcgctacgtggtctccatggggaggtgagtgcagggcggggggtctccagggacagacgtagcgtgagtgctggcctggccgtgccctgatggcgcttatcaaaagtgtcatctacattcagtgaaatcccacgtggtcccggcgctgcccttcagccgtctcggtgcctccaccctaggcagatgcgctggtgggcctctccccagaacgattcctcccatccacccccacgcagcagaccccacattccgcccagttctctgctttactcacacataagtgatgacaggtgctgtagatagttttataatctcagccttctcacttgccattagttttttttctttttttttttttttttgagacagagtcttgctctgtcaacccaggctggagtgcggtggaaccatctcggctcactgcaacctccgcctcccaggttcaagcaattttcctgcctcagcctcccaagtagctgggattacaggcatgcaccaccacacccagctaatttttgtatttttagtagagacggggttttaccatgttggccaggctggtcttgaactccctcaggtgatccgcctgcctcggcctcccaaagtgctgggattataggcataagccaccacgcctggccttgccctcattttttagtcatttccccgtaacattgaaaggtatttagtctcttaacattttaaaatatttatttatttacttaaagatggagtctagctctgtcgcccaggctggagtgcagtggcacgatctcagcccactacaacctccgcctcccaggttcaagcgattctcctgcctcagcctcccgagtagctgggattacaggcacctgccaccacacctggccaatttttgtatttttagtaaagaagaggtttcaccatgttggctaggatggtctcgatctcctgatctcgtgatccacccacctcagcctcccaaagttctgggattacaggcatgagccaccatgcctggccaatatttattatttttattttttagagacagagtctcactgagttgcccaggctggagtgcagtggtgcagtcatagctcactgcagccttgacctcctgggctcaagcggtcccccaaccttagcctctcagagtgctgggattacagatgtactccactgtgcctactttttaaaatttctgtagagatcaggtcttgataagtttacccttttaaagcgagcagttcagtggtttttaggccaccacctctaattccagaacattctcatcacccccaaatgaaatgctgtccccatcagcagtcactctgcatccccttccgagccccggtgcccacacctcccctccctgtctctgtggatgggcccgtcctggacatttcacagaaacaggatcacacgccgcatggccttctgtgtccggcgtctctcactgagcgcgacgtcctcaaggtgcatccgtgctgtggcctgtgtccgagcctcgtgccttttcttggctgaataatatcccactgtgtggacatattactaatctaattctaaacagttaattagaatattccagagttttcataaccgtctcccactgctgggcattcagggtatgtccatttttacggctgtgggaagcagtgctgggagtggagtctgtgtggtctcctggggtttccagctccctgccccgggtggaccccagcgcctcactgacagagccggaatcaggcgagggtgaggctcagccgccccatagacaggggctgggtgttggcactgtggctgtctgaagtggctttttgttgacacatgtgatctgacacatcccagccccgggaatcggtggtcaggagccccctcgggaggggagcacttttccccgagttatcagccacgtgtgagcttgcgccccactggtcccacagaggctctgggagcctgtgcgtgtttgctcattgcttctccgtgacaagttccagcctcgtaggtgcctggcctgcagttgaaggcgggtggggatggggcgaggcctcgtggagggagggtgggcaggcgggtcttcggcacactcccctcacggtgcctccccaacagctgcgccaacggaggaggctactaccactattcctactcggtggtgaggggctgcgaccgcatcgtgcccgtggacatctacatcccaggtagggccgggaccgcaccgcccacgagggagctggagacagggccagcgccacacggagcccggcggcccctgtgagggagtcccacacccccagcagacggcgggctcccccatcctatggatgggccgactcggagcgctgcctcttagtggagcctgtcccctgtgagaagtcggcgatgtattcaggcatcagagggatcagagggagcaggggaagctgagtggaattcctgacacacgcctggtttacagcagtttcatatggtcctacctggcacaaaccaaagacctgcagttagaaataccaagcgagaaggttcctgggggccaaggacactgtcccgcgccctcagccttacagaagggcacgcaggactccctgggacccggggtggccggatttggcaaatgaaaacgtgggaggcttagtttgactgtgaggttagggtgaatttgaccatcaggaaaactgttagtagtaattgtttagtacgagtatatcccaacaatatttgggctatactgacactaaaaagagcattggctgcatacctgaaattcacatcgcaccgggaacattctttatatctggtgatcccgtgggactcttgcacctcacgtggtcccacgagggccatccccccgggcgttcaccttgacagtggtccacggtaggcaggcttggaggtggcgctcatgtgggacaggggacagagtcctgttcttggccaccctgtgctgcgtgcggcattagctcatgcgcagagagcccagccctgagtcccgagtctgggggtttgggcaagcgagaggcacatcctggtgcctctcaaaagtggaggaacaggctctgactttggattccgcttccctggaaagggcgttgatttgttcagcgttctgcacggttcaggtcaccccgggggcagtggagagggcagcctgggcctccctgtgacttgacagcacagagaggtccatcctggggtcaggagctctgcccatgcccctggcgtcttcccctgcagtgcagaccaatggggcaagttgcgagtgtggactgtactcctccctccttgcagactgagctcctccctccctggggaccgcgctcctccctccctgcggactgtgctccctgtctggggactgcgctcctccctccttggggaccgtgctcctccctccctccctgcggaccgcgctcctccctccctggggaccgcgctcctccctccctgcggaccgcgctcggccctccctggggaccgcgcccctccctcccagcggaccgcgctcctccctccctggggacctcgctcctccctccctccctgcggactgtgctgctccctccctgcggactgtgcttctccctcccttggagcagcctggacttgccagagctctgccaggtggggcctggccgccctttcccaggccctgcagtggccttgtcctttctcacctgtttccactcctgctgtccccgttgggccctgggcttcgtcctcttgctcaagccctttgttctgaacctgcgtggcagccgggactgggggatccccagcaaagagctctggcttggggctcagaaagagggtcatcgggtcctcgtgggatgcccgggctctgggccacctcccctccctccgcccagcctccctgcctccatctccgtccagggcagccccgggccctgctccccactgctaagtgtgtctgctgagcgctggcccccattgagtcctgagggctggggccgggggccgggttagtgaggtcagcgtcttgtccgagaggtccctgtgacagcccgggatgagccacgggtggagggcagtggggccttgcccaggggaggaccccactcttcctgcagggacctcccctgcgccggctcccagtccctggcactgcgcccacccagggctgtcagcctccaccttcagaggccggcccgggaaacccttccaaagccgagccggctgcgctgtgcacgcggtcacgcgggctccggctgcgggaagcgagactgaggcaaggtccctgcaggctgcccacctacggccgaggccctgctctacggcatcctgcagctgcagaggaagatcaagcgggagcggaggctgcagatctggtaccgcaggtagcgccgccgccgccgccgccggagcctgtcgccgtcctgtccccagcctgcttgtgtcccgtgaggttgtcaataaacctgccctcgggctgccgcctcccagtgtggtgtgtgggtgaaaggagccggggacgtggggggatcacagaccccctgcggcgtgccgcccttgggctgggggcggttggagcagagccgggggcagagacgggcactgtgcctgccagcagggtcctttcccgctgctctgcgaagaccctggggtggacatcgtggcccaaagtcccgagcgtggaaggccgcacacccatccttcctgggagggccctgactcagtctccctctatgccctaaggcaggctgagcaaagcccgtctgagcctgccccggggttcagagtgtggcctgtggcctgcgtgtggacttgggcaggtcgccactgccctctggcccatttccaggcggtggcatgggctggttagctgagggctggggccagggagatggggaggtggcacctggtccaaaccaaagggctgcagggcaggactgtgagcctcacaggctgtctgaccccactttggggaccctctccacccagggctttcggggaaccctgactccaccccaccagccccttcatccgtcgaagtccaggcctcatcagggacgtgcattcattcagcaaacgtcccatcttcctgtgttcagcgccagatgccgccggtgctgggacctcgctctgcaggcccaccctgcatgcctgctgcacaccagggacagttctggggatcggcagttatgacgggccaggctgggatggggcccgggagactggggcgggggtggggaagaggcacccagcccagccgggtcaagcagcctggaagcaggacatgctggggtggggacagggcgtcagccagcggaacagcagccctgggccagagtgcagagcacaggagccggccttctctcagggcaaggaggtcagtggagggggcgagcaggacggccccaggaagatgggcgggctgcacacatgtggatgcagggggcaaagtgggaggcatggggtgaccagctgggcacaagggcacagacaggcaggacccgggatgttcctggggctgggcaggtggggctgcccctgcaatgggcccagcaggggcgatgcctcctgagaggaaaccacatctggaaatgggaggcttggggaacggggctgtcagcagccacgcccctcctggggcgggaggaggggagctcagggtgtgctggggcgggcagagaagtgggttcctgcctggggtgggcaaagatccttgtcccacccacaccccggccgtggtgctgccaccccctgagaccctgacctagttacccccttccctgaccccactgcaaagggtcaggtggctttcatctgaggaagggacatcgggcatcagctggagatgtctgctatgggcaagacagtggggggggcggggcggatcctggggccgctcagaaacctggaggggagtcacccacttttcctgtgtccatgggatgggcgggaggtgagggagcagccgctggaagtaacagtcgcacgctcactgccgactggccaagcccagcgccggcgtttacttcacctcagggaccctgcagtgggcagcagtgaccctcacagagaagctgggaaagctgctggtgacacacagctgggatcagccctgggctggtgggacccctcacagagaagccgggaaagcttctggtgacacacagctgggatcagcccagggctggtgcgacaccctggactcccggccaggaaggcacggaggagggcatgggtgtggccgggccggggtgggggctcagcctttggtcaccaggggcgtgatcatctgtgggaaggcgtagtagcggcagtcggccggtgggaccagcgccatcacctccgtacggatgttctccctccggaagccggcctccagcagcgcgggcacctgcgtctcctggtcggggatggcaccaggtcacctctgagggccatgggggtcacgtgcaccctggcgcccacccctcattgaagagtgtttacagatggcaaggcccgggtgggcggctgcagctcccgtgggcacgtggcagggcagccctggaagcccaggtgtgaacgggaatctccagctccccagtgcgggcagcagcttcccggctgtcctggaaccccagccccacactcgagccacccccgggcacctactccacagttctccagaccttgccagtgtggcgggtggagccaaagaatcacaccagaaaaagaacacaggccactagttcccattttggaagaaaagctgccccaggggccacaggcacccagccggctctcacaacagcagcccagggcaaccacatagagcccttctcagataggccgcctccaccaggcagagggaacagcgagacaagcactgctgaaccagcaaagacagccaggtggaggcagctggagggaggggaacacgcagggcttaggctgaaccacagggcactggggagccatgggaggttgttgagctggtgagggactttgatttccattttttttgtttttgttttgttgagatggagtctcggtctgttgcccaggctggagtacaacggtgcaatctcggctcacagcaacctccgcctcccatgttcaagtgattctcatgcctcagcctcccgagtagctggaattacaggcgcccgccaccacgcctggctaacttttgtatttttagtagagatgggattctgccatgttggccaggctaggctcaaactcctgggctcaagtgatccacccgccttggccttccgaagtgccgggatcacaggtgtgagccaccacgcccagcctgatttccattttttttttaaattttctttctttctttctttctttcttttttcttgagacagggtctggctctgttacccaggctggagtgcagtggttcgatctgggctcactgcaacctctgcccctggggcccaagcaatcctcctacctcagcctcccaagtagctgggagtacaggcacacgccaccacgcccagctagttttttgtattttttttttttaggaaagatgaggtcttgctctgtagcccaggctggtcttgaactcctaggctcaagcaatctgcccacctcggccttccacagtgctgggattatagacctgagccactgctcctggcagccactgcgccaggcaaaggactttgatttctaaatgaaccagcacagtccagcccacccagggggtcaggaagggaccctccccaggtagcaaggtggctccagcagccccttcccacccccatccaaggtcacttcctggagacccatggggaacttcaggtgggcgcacctcaaacatgatggtgatgtctgagtacttggacttcatcagctccccccaggaggtgaggttgcagtaggtgaggacgccccccggcttcagcaggcgaaaggcgtggttctgtggaaggggagtggccagtggtcaggacggaggtgggggtgtgggcagaggggcttccccgagggcctcccgcatcccagcaagtcagagagaaccaccttgatgaagttgaactggtgtgtgtgccaggtctcctccgagagtgggtacgtgtcgtacaggatccctgcacggagaacagaagcccacgcggtcagggccgggctcagcgcctcacccagcctcacccggctcatcccccagcgggtggaggtgcagtgagacggggccgtgggtagaggtggggctcccacacaggcttgagaaccccgagatcgcctccagggcccctccgtgagcatgcccatccccggtgctccgccatcccacagccaggcccacacccacttgggctctgtccccccagtgcacatcagagggacccccacaagcaaaggaggggctgcattggagctggggaggcccaccctgtgatacgtcccctcacccctcaccatcaaagtgaccgtcaggcagggtgggtgccacatcctcccacaggcctttcaaggggatgaccttgcagaggggaaaagaaaaagagaggacagggtagagaggtccccaggatctccccacctgcagaaagggagcggccagggggactcccgagagagaagaccacctcctccacctctgacagccccaggcccccaacccccaggaagcagtgccctcaccccaaggagtgggggtcctggagggcctgcgggcagaggggcaccttgtgtgtctgccgtggggcccagtcccggagccgctggaagacgccgtcattgcactcgatgatccaatgctcatcaatgggcgcctcctgcacctttgacgctgcgatggccatgccaaagcccacctccaggacccggccccctgggcagacacagggcgcctggcatcactaggtggggcgggcttaggaggctgcctggaggaggggcacagggcagggcagggctggggagactgcctggaggagggggcgcagggctgggctgggggtctgcctggaggggggcgtgcagagcagggctggagaggctgcctggaggagggggtgtggggcaatgctggggaggctgcctggaggagggggtgcggggcagggctggagaggctgccaggaggaggggatgcagggctggggaggctgtctggaagagggggtgcagagcagggctggggaggcttcctggaggagggggcacagggtagggcagggctgagctgggggtctgcttggaggagggggtgcagggctgaactaggctatgtgagtcacatttgccacaggacgggagggcaccctgggccagcatggacagaggcgggcggaacacagtagtcctgagcgggaacagcgtgggccctggccagcggccagagagaggatgaccagccagggaggccgaagacggccgcttttggggccaggcctgtggggaggcgagagccttggactttgagcccagcccacgctgtttgtcccgggtcccttatctctcgggttagttacttttctctccccctccctctatccgaaagttggatttgcaagagtggccaggcaagacctggacttgagactatctgggaggggaaggactggtccccagtgggccacacatgggccccccgctcaatcctgattggcactggacactggacgtgcccattttcagggtgggaacactgaggcccgacccctggacggggcctgtgtggggccagggagtcctttcttagcagcccttagcgtctgacgccaggcaggccagggccaccccggggacagctgtctccctgagctcagctttccgagtgctattcttagccgggcgagtcggggctgctctcccaggcaggcagaagggcagcctctccctggcacgaccccttcctcccgacctcagacagggagctggggacccggttccacccagtttcacccaggtctcacgtttgaggtccccatctggagagcggggggcctcactccccctggagaggaagtttctggtacttaggcggtgcctaacgtgtgcgggccccacgcctgccgcactccccgtgaacgcctccgtgtgcccccacctgcagccccacttcccaggcgaggagacagaggcgccccggcgggagggtgggctgcagagtccccgggtcggggcagccccggcctcagtttcccctgcgcccccgggggcggtgcaggccgggcgggggctacctttggaggaggcggcggcggccagcgcgtgcatatagggggtctcccagcgctccatcaccggcttgcccaggatgcgcaggtgcgtgtccgctgcgtcgtaggccgcgggcgccgccccccacgcggggctgcagttctcgccgggcgcgaagatgggggtcgcgctgggggcgctcatgctgcaggctggacggcgacccgacctcgatcgcgcgccgcccgggcccgctccctgcaggggcttgtgggccgggggcgggtccaacaggcccggggggcggacccgcgagaggacgcgcgcgcgcggctccgggagcggcctctagcggcggccacgcgagaggtggcgggagtggggtcggggccccggccgccccctccccaaggagcctcggtgccccctctgcggagcgggcaccgcagccccgcgcccggggacgcgaacctgcaggctggggactggaatccccgccttgccgcttacgcgccatagattcctcatctgtcagcaccgcagaaaggccccctcctcgctggggtgtgagaatctgaggatcttccaggcgctgttggaagtgctttaagtgtttaaaatcatttaatcttcagaagatgctacagtgagttctgtctttttttaatagagacggggtcttgctatgttgcccaggttggtctcaaactcctgggcgcaagcgatcctcccgcttcagcctcccaaagtgttgggattacaggcgtgagccaccgcgcccgccaggttctatgatgactgtcgtttttccttccttccttccttcctttcttttttgaaagcaagtttattaaggaataaaaatgaatggctactccatagagcagccgactgtcattttacagatgtggaaactgaggctttgagaagcaaagccggtggtctggtggccacgagggtggggacccagcattagagctctgatgcccccctttcatgagcccatgtcacacccccataggctgggggtcatctgagaccccgggtccctaatgggggattccgcccaaagacgcctccagttctggagaccaggactcaatcccagcagtgccctttcctccggcggccctgcagctggggtgtgcgggggtggaattaggcctcccccagcccagggtagccccttagggtcaagcacaccccccgcctgtttcctgggggcccccaagcccgctgcggtggcgtcctggctctgatagccggtttccttccccctctgaacgtggggccacagtcatgagccctgagcactgcctgcctgcctgcctgcctgcctgccgtgcgttctgcacgggttaacagatgcagttattatgcccatttaacacgagggaaactgaggcccagagaggttgaggttcacaggttgcagcagggccacggtgtgaacgcaggcagcctcggaaacagctcccgcgcgcggccttccctgcgccaccttgtctgggtagctgcctgccccatcactgcctgctcaacgcctccacatgcccctgccacctcttgcacagctccttagccccgggccttggcacacgctcttccccttgcccagacagcctctctcctggtcaggccgctttctcgttctgtctcaagctgagcccacgtgtcctctaggagacacccccattctgccccaggacaggcatgtcctggtcagaagctgttttgtttgtttttgtttttctgagacagagtctcactctgttgctcaggttggagtgcagtggcatgattttggctcagtgcaacctctgcctcccgggttcaagcgattctcctacctcagcctcctgggtagctgtgatgacaggcgcccgccaccaagcccggctaattttttttttttttttttttttttgtatttttagtagaaacggggtttcaccatgttagccaggatggtcttgatctcctgacctcgtgattcacccgcctcggcctcctaaagtgctgggattgcaaggtgtgagccaccgcacccacccggccagaagctgttttctctctctttggtagttcactaacggaaggtatttcttcatggtcctagcgtccctctcacagggctgtcagtgatcctggcacacagaacatgcttgataggctgggtgcagcagctcccacctgtgatcccagtgcctgggggaggtgcaggggctcaggcctgtgatcccaccactttgggatgccgaggtagaaggattgcttcagtgcaagagttaagaccagcttagaccacacacagagaccttgtctctacaaaaaaaaaaaagttttaaaaattagccagggccgggcgcggtggctcacgcgtgtaatcccagcactttgggaggctgaggtgggcggatcccctgagaccagcctggcaacacggtgaaaccccatgtctacaaaaatacaaaaatagctgggcgtggtggtgggtgcctgtaatcccagctactcaggaggctgaggcaggagaatcgcttgaacccgggaggcggaggttgcagagaacatcactctcagtgaaataagccagtcgcaacaggacaaatcctatgtgagtccactcctaggaggtccctggagtcctccgatccacagagacagaacgtaggatggcggggggggggggtgccaggggctggggaggggacagggagtgagtatttcacggggcagagtttcagtttgggaagatgagaaggttctggagaggacggcggtgatggttgcacaacaatgggaatgcgcttaatgccaatgagctgtgcacctacaaataattaaaatggggccgggcgtggcggctcacgcctgtcatcccagcactttgggaggccaaggcgggcagatcacctgaggtcaggagttcgagaccagcctcaacatggagaaaccccgtctctactaaaaatacaaaattagccgggcgtggtggtgcgtgcctgtagtcccggctattcgggaggctgaggcagaattacttgaacctgggaggcggaggttgtggtgagccgagatcgagccattgcactccagcctgggcaacaagagagaaactccatctcaaaataaataaataaaataaaaacaaaaataattaaaatggaaaattttatgtcacatatattttaccacaagaaaaaaaggggaccaaaactacataccgtgtgttggatctgtttatagtcacactgggagtaaattcagatcagtatctgcacagcctttttctcgctgcctttgccctggagtggaaggaaggaaatgaatggggaagagggagaagcggagaagtagcctcttctagttctttcttccttccttttttttctttttcttttcttttcttttttttgaggtggggtctcgcactgtagcccaggctggagtgcagtggcgcgatctcggctcactgcaacctgcacctctcatgatcaagcgattctcctgccccagcctcctgagtagctgggattacaggcatccgccaccacacctggcttttttttttttttttgagatggagtcttgcactgtcgcccaggctggagtgcaatggtgtgatctcggctcgctacaacctctgcctcccgggttcaagcgactctcctgcctcagccccctgagtagctgggattacaggcacccgccaccacgcctgcctaatttttgtatttttagtacagacagggtctcgccatgttggccaggctggtctcgaactcctgacctcaggtgacccgcccacctcggcctcccaaagtgctgggattacaggcgtgagccaccgtgcctggcctgtattttaaaaaatatattatttgtaatcagcttgtgcccgacttccttctttgggccacattctgtgcatttcatccacccactgcttcattgttcatttatccagtcaccaatagatggatgtgtggttatttcaaatgttccagtcttgttttgttttgtttttgatagaaacagggtcttgccatgttggccaggctggtctcgaactcctgacctcaggtgacccgcccacctcggcctcccaaattgctgggatcacatgtgtgagccactgagcccagattttttttttttttttggcagggtttggctccgtggcccaggctggagtgcagtagtgcgatgtcggctcactgaaacctccaactcctgagctccagccatcctcctgcctcagcctccaagtagctaggactgcaggtgcgtgccaccaaacctggctgatttttgtattattattattattattattttttgtagagatggggttttgtcatgttggccaggctggtcttgaactcctgggctcaagcgatcctctcatctcagccttccaaggtgctgggattacaggcatgagccactgcatccggccagttttattttaaatggggttttagtcccagctacttgggaggctgaggagggaggatagctggagtccaggagttcaaggctgcagtgagctatgactgcatcattgcactccagcttgggcaacagagtgagagcctgtctcaaaataaaagaaaaaaaagtgttttgtactatttgtctgtgatcttgttccttgtattttttttttttgagacagagtcttgccgtgtcgcccaggctggagtgtagtggcacgatctcggctcactgcaagctctgcctcctgggttcaagcaattctactgcctcagcctcctgagtagctgggactacaggcgcctgccaccatgccgagctaattttttgtacttttagtagagacggggtttcaccatgttagccaggatggtctcgatctcctgacctcgtgatccgcccaccttggcctcccaaactgctgggattccaggagtgagccaccatgctcggcccttttttttctaagagggagtcttgctctgttgcccaggttggtgtgcagtggcgcgatctcggctcactgcaacctctacttcctgccttcaagcatttctccggccttagcttcccgagtagctgggattacaggcgcccaccaccacgcccggctaattttcttttgtatttttagtagagacggggtttcactatatatgttggctaggctggtctcgatctcctgacctaaattgatcctcggcctcccaaagtgttgggattataggcgtgcgccacctcacccggccttgttccttgtatttatttaattctgtgatgatgaataaaccaaacgatcaggctgtcaatgtgctgtgagattaaggagaaaagcagtaggcagcacgtacccggttttacaaaaccctgcgggtcacctgtttactaccgtcagcctagaccggtttttccacctccttctgctgacattggaggacgggtatcattctttttggggggtcgtcgtgtgcactgcagggtgctgagcggcatgtctggtctggacccactcgatgccagcagcaccccgcactcaagttgtgacaaccaaaaccgtgttttcagacattgccaagttatcccctagggggcaaagtcacccagaagaagaaccactgatgtatgcaattaacagatgcaactaaaacagtatttggctattaatagtaatagcacttggggggggggtcaataatatcttttcatagtcattgaatttagttaattgttttgatttgattccagttcagccccgaactgggtgaccttggccaagtgactcagcctctcggaccctcgggatcctcttctgtgaaatgcggacaggggaaggagcctcgcgcgggacgctcacgtgccgttcccgctccgtccgcccgcctggggtgcgggcgggtacactcccactccccgcagcgccccacgcggctccaccgcttccgagtgaagagttaaagaggaagcggcagccgcgcctgcgcccacagtgcctagcccggagcgccggtctcgcaagcgcgcacgcgcacgcaagcccgcacgcgcgcgcacgcacgcacgtggctcggcccgcgcgcatcctccccttgcaggggcggggccagcgcagggactccatttcccagcgtgccccgcggcaacgccaggagcctccgaggagaaaggaaaacgcgcgacggccccgactgcggcggcgcgaaatccgcctcagggacgcacgcacagacggagtacccctggacccgcccccggagaccccgtgcgggagcgcgcccgggcgtgcgcaggggcggcggcgcggcggcgcggggacgcgcggtgaccgttggcgccgaggggaggaggcagccgccgccgccgccgccgccgccgccgccgccgccgccgccgttgcgcagatccgggccgcggctgtggggagggcgacggagcgggtgaccttccggaggcgggagcgagcgaggaggcccgggagcgccgagcgtcgccgccgccgccgccatgaacaactcgggcgccgacgagatcgggtgaggacgagcggcgcgggcctgcgtctccgccccgagcccggcccgccgctccccgccgcccggcctcagacgccgccccccggggccgccccgtcaaggtcacgccggccgggggcggactcgggacccggactcgccgcggcttcgcgccgggggccctggacgggtgcccggggtctgggggggtcctggcgcccccgccgccgcttcccggcttcccgtcctgggggatcctgaaggagagcctgaggggtccggggggccccgccgccgcctccagacttcctggtcgggggaaccccgaacggcaacctgggggggtgtcctggggcgcccgtgccgccgcttcccgactgcgcgtcctgagggaccccgaatgggagccagaggggttcaggggcccccgccgccgcttcctggttgtggcggccccgaacgggaacttgggggggtctggagcgtccccgttgccgcctgtagggcttcctggcctgggggaccccgaatgagaacctgagggagtctgcggggagtccagggcgccgtcgccgccgcctcccggcttcctggccagggggaccccaaactgtggcgtggggggtggtccggggcgcccccagcgcgcgcccaaacttggcgggcggcgcacgtggcgagccgaggcgagggttccggttctgccaccgcccaacctatcccactcggggctccgggctccccgctcccatcccacccccccaaagtggtaaggtcgggaggggttcgcaaacccagggcccagggggctcgggtcagccggggcctgctgtgtttacgttgcctcggcgcctccccgccgggggtgggcttgagctgcggaagggagagtcagcgcttccgaggcggcgacgggcccgcggatctttgctgcgccgaggcgtcccctcctataggagcctgacctgctccggaccccgcggggccgggaaacctcatttcgctgtgccccagggctcggcgccattctttggtaggagcggctcctgccgcagcgacgtcgttttagagttgcattcttccggcaaaacagtctgggttgggtttcctagtggtctggtgtaaatttctcggtgcccttagctttgagcagcgccctgtgttctcagcgctgggcttggctagtgcgggagcggttgctgctagagggttgccttggcaggcgcctctcgcaccagctacaggtcacacttgtggatgggaaatgccttttgtgggctctccccctccccagacaaaacaaaagagcaccttccgttggagaaccaggatgaaagcacttagcccctgcctagcccgtgctgtgagtcctctccaggcactttgacttggcagggtccgtgtgcctgtgtgagggacattgcagggatgggcctgagcagggagtccaccggccatgggggatggagccatcgactttggggtgaggcagggaaagggctcccagatggggtacctggattaggtccattcaagccgcgggtgaacgtgggcccgctccacccaagccgtggctgtgaggaggctggagagaggtgagggctcctgtcccctccctgcatggacacccttgggaagtggggcagctggggtcccagcctgggtctggaggggtcccacccacagcacaaataggctcgcaggccacccggacgccacgggctgcgtggaggagaactggagtgcatggaccctgctctcctccccggctgccaggagtgtccactgctttctaagtcagactccttgggcaagaagtgttgccacagccgcccgtcgcatgggagaccggcttccattctatgcggagtccacggtctgctctgatcttgctgtgtggagttgttgtgtgcgtgaaatgcttgtgaccctgcgaagcgccctcctggcaagtcccctgcaggtgcggtgggtgccatgcaggagggtgctgagcttggatggaagcaggccctctctgcggcagatggcggctctcaggacgccatgggtctgcggtgtcccttacccactgggggggctcggcagcctgaggagctccctcttcctgatgcagagccctcactgctcactgccatggaggaggcaggagatcccgccggaccccgcttggagggctgggcctggagcatgcatgggtgcggggtcaacgcctcaggagacttggagcttgggagccccctgttctgggacacttgtggccgtccagctgctgccctgggaatccacacctggaaggtgggttagggagccatccttgggggaagctctgcttttgagtctgagaagtcgtcccaagttttgagggtccctgtgctggcttagaagtccatgtaaagcttgatgggggatgaaagtcagctgaggcctgccggtgataacggatgccttacacacaccgacttccagtcagcttgaggggggcttcatgcaggaggaagcgcatacgtgtggtggggtgtggggagtccctctctggatcctggtgggtttggcacgcggaccctacatggtggatgtgatggacagtgtcctcctttgggagcggggcctgtcctggtcctcttgtgaagggtgggggacaggcactgacctgtcaggagggttagagggttggcaccagcaggtggcctggagcgctcagagcacgcgcgatcaggaaggcccgagtctccagtgtgccctccctggccttgtgaagtcatcttaaagtctggcttgagcgcctctgacttggattctgggaagctgacacagcgcggccggggtcgccacatcctgttgagtagccgctgggtgctaggcgcctgggtggtagaccaggtgtcagggatagggcccatgcctggcctactggggagaggacagaggctcagaggggtcacctcgagcgcccaggccattgtgttctgctggcttccaaggcagcacacggtcatggaactggagagagaggtttatggaagattttatctggtacactggggaatggtaagacagggacacctggaaatattgtaggaaagtcacagagggaggaaggactcagcggagagaggagaaagccgcctctgggcagcttcgaggatacccaggactgtggccgggggccatgcagctcagagccaggcccatggcaggtctctgggtttattgggtggctgtggaaggagacatcctgagtggggctcctggctgggcccctagaggccgtgactacttgtacctgtgcagagtgagcacaaggcacctggcaagattgttggtcaggccagagagggccgtgatctgggggaggctgttgcagtgcggggagtgatagggaacctcatggggccgtgccggcctttctggggctctcttggtgcatttggagttattccgaggcaggtctcctgggctctgtcagcactctggcctggatc

SEQ ID NO: 72 - DNA, 360 bp, Homo sapiens
tttttattccagagtcttccaccctgtttaaagatttcaagaagatggcaaaatcatcttacatttttcagacttcatcttcaaaactgccattaccaaacgattccgccacacatccttttagctacagggctgatacatccttctgtggcttggagatgaataggatgattccgtgtgtgtactgattcaagaacaagcaatgatgacccactaaagagtgaatgccatttagaatctagaaatgttcacaaggtaccccaaaactctgtagcttaaaccaacaataaatatgtattacctctggcagtttctgtgggtaaggaatttagaagcagcttatctgtgtgttcctgtctc

SEQ ID NO: 73 - DNA, 4119 bp, Homo sapiens
ctggagagcctgctgcccgcccgcccgtaaaatggtcccctcggctggacagctcgccctgttcgctctgggtattgtgttggctgcgtgccaggccttggagaacagcacgtccccgctgagtgcagacccgcccgtggctgcagcagtggtgtcccattttaatgactgcccagattcccacactcagttctgcttccatggaacctgcaggtttttggtgcaggaggacaagccagcatgtgtctgccattctgggtacgttggtgcacgctgtgagcatgcggacctcctggccgtggtggctgccagccagaagaagcaggccatcaccgccttggtggtggtctccatcgtggccctggctgtccttatcatcacatgtgtgctgatacactgctgccaggtccgaaaacactgtgagtggtgccgggccctcatctgccggcacgagaagcccagcgccctcctgaagggaagaaccgcttgctgccactcagaaacagtggtctgaagagcccagaggaggagtttggccaggtggactgtggcagatcaataaagaaaggcttcttcaggacagcactgccagagatgcctgggtgtgccacagaccttcctacttggcctgtaatcacctgtgcagccttttgtgggccttcaaaactctgtcaagaactccgtctgcttggggttattcagtgtgacctagagaagaaatcagcggaccacgatttcaagacttgttaaaaaagaactgcaaagagacggactcctgttcacctaggtgaggtgtgtgcagcagttggtgtctgagtccacatgtgtgcagttgtcttctgccagccatggattccaggctatatatttctttttaatgggccacctccccacaacagaattctgcccaacacaggagatttctatagttattgttttctgtcatttgcctactggggaagaaagtgaaggaggggaaactgtttaatatcacatgaagaccctagctttaagagaagctgtatcctctaaccacgagactctcaaccagcccaacatcttccatggacacatgacattgaagaccatcccaagctatcgccacccttggagatgatgtcttatttattagatggataatggttttatttttaatctcttaagtcaatgtaaaaagtataaaaccccttcagacttctacattaatgatgtatgtgttgctgactgaaaagctatactgattagaaatgtctggcctcttcaagacagctaaggcttgggaaaagtcttccagggtgcggagatggaaccagaggctgggttactggtaggaataaaggtaggggttcagaaatggtgccattgaagccacaaagccggtaaatgcctcaatacgttctgggagaaaacttagcaaatccatcagcagggatctgtcccctctgttggggagagaggaagagtgtgtgtgtctacacaggataaacccaatacatattgtactgctcagtgattaaatgggttcacttcctcgtgagccctcggtaagtatgtttagaaatagaacattagccacgagccataggcatttcaggccaaatccatgaaagggggaccagtcatttattttccattttgttgcttggttggtttgttgctttatttttaaaaggagaagtttaactttgctatttattttcgagcactaggaaaactattccagtaatttttttttcctcatttccattcaggatgccggctttattaacaaaaactctaacaagtcacctccactatgtgggtcttcctttcccctcaagagaaggagcaattgttcccctgacatctgggtccatctgacccatggggcctgcctgtgagaaacagtgggtcccttcaaatacatagtggatagctcatccctaggaattttcattaaaatttggaaacagagtaatgaagaaataatatataaactccttatgtgaggaaatgctactaatatctgaaaagtgaaagatttctatgtattaactcttaagtgcacctagcttattacatcgtgaaaggtacatttaaaatatgttaaattggcttgaaattttcagagaattttgtcttcccctaattcttcttccttggtctggaagaacaatttctatgaattttctctttattttttttttataattcagacaattctatgacccgtgtcttcatttttggcactcttatttaacaatgccacacctgaagcacttggatctgttcagagctgaccccctagcaacgtagttgacacagctccaggtttttaaattactaaaataagttcaagtttacatcccttgggccagatatgtgggttgaggcttgactgtagcatcctgcttagagaccaatcaatggacactggtttttagacctctatcaatcagtagttagcatccaagagactttgcagaggcgtaggaatgaggctggacagatggcggaacgagaggttccctgcgaagacttgagatttagtgtctgtgaatgttctagttcctaggtccagcaagtcacacctgccagtgccctcatccttatgcctgtaacacacatgcagtgagaggcctcacatatacgcctccctagaagtgccttccaagtcagtcctttggaaaccagcaggtctgaaaaagaggctgcatcaatgcaagcctggttggaccattgtccatgcctcaggatagaacagcctggcttatttggggatttttcttctagaaatcaaatgactgataagcattggctccctctgccatttaatggcaatggtagtctttggttagctgcaaaaatactccatttcaagttaaaaatgcatcttctaatccatctctgcaagctccctgtgtttccttgccctttagaaaatgaattgttcactacaattagagaatcatttaacatcctgacctggtaagctgccacacacctggcagtggggagcatcgctgtttccaatggctcaggagacaatgaaaagcccccatttaaaaaaataacaaacattttttaaaaggcctccaatactcttatggagcctggatttttcccactgctctacaggctgtgactttttttaagcatcctgacaggaaatgttttcttctacatggaaagatagacagcagccaaccctgatctggaagacagggccccggctggacacacgtggaaccaagccagggatgggctggccattgtgtccccgcaggagagatgggcagaatggccctagagttcttttccctgagaaaggagaaaaagatgggattgccactcacccacccacactggtaagggaggagaatttgtgcttctggagcttctcaagggattgtgttttgcaggtacagaaaactgcctgttatcttcaagccaggttttcgagggcacatgggtcaccagttgctttttcagtcaatttggccgggatggactaatgaggctctaacactgctcaggagacccctgccctctagttggttctgggctttgatctcttccaacctgcccagtcacagaaggaggaatgactcaaatgcccaaaaccaagaacacattgcagaagtaagacaaacatgtatatttttaaatgttctaacataagacctgttctctctagccattgatttaccaggctttctgaaagatctagtggttcacacagagagagagagagtactgaaaaagcaactcctcttcttagtcttaataatttactaaaatggtcaacttttcattatctttattataataaacctgatgcttttttttagaactccttactctgatgtctgtatatgttgcactgaaaaggttaatatttaatgttttaatttattttgtgtggtaagttaattttgatttctgtaatgtgttaatgtgattagcagttattttccttaatatctgaattatacttaaagagtagtgagcaatataagacgcaattgtgtttttcagtaatgtgcattgttattgagttgtactgtaccttatttggaaggatgaaggaatgaacctttttttcctaaaaaaaaaaaaaaaaaaaaaaaaaaaaaaaaa

SEQ ID NO: 74 - DNA, 4699 bp, Homo sapiens
ccgcgcggccatggactgagcgccgccggccaggccgcggggatggggccgccgctcccgctgctgctgctgctactgctgctgctgccgccacgcgtcctgcctgccgccccttcgtccgtcccccgcggccggcagctcccggggcgtctggatggagtgtttggaaggtgccagaaggttccggcaatggacttttaccgctacgaggtgtcgcccgtggccctgcagcgcctgcgcgtggcgttgcagaagctttccggcacaggtttcacgtggcaggatgactatactcagtatgtgatggaccaggaacttgcagacctcccgaaaacctacctgaggcgtcctgaagcatccagcccagccaggccctcaaaacacagcgttggcagcgagaggaggtacactcgggagggcggtgctgccctggccaacgccctccgacgccacctgcccttcctggaggacctgtcccaggccccagcctcagacgtgctcgccaggacccatacggcgcaggacagaccccccgctgagggtgatgaccgcttctccgagagcatcctgacctatgtggcccacacgtctgcgctgacctaccctcccgggccccggacccagctccgcgaggacctcctgccgcggaccctcggccagctccagccagatgagctcagccctaaggtggacagtggtgtggacagacaccatctgatggcggccctcagtgcctatgctgcccagaggcccccagctccccccggggagggcagcctggagccacagtaccttctgcgtgcaccctcaagaatgcccaggcctttgctggcaccagccgccccccagaagtggccttcacctctgggagattccgaagacccctctagcacaggcgatggagcacggattcataccctcctgaaggacctgcagaggcagccggctgaggtgaggggcctgaatggcctggagctggacggcatggccgagctgatggctggcctgatgcaaggcgtggaccatggagtagctcgaggcagccctgggagagcggccctgggagagtctggagaacaggcggatggccccaaggccaccctccgtggagacagctttccagatgacggagtgcaggacgacgatgatagactttaccaagaggtccatcgtctgagtgccacactcgggggcctcctgcaggaccacgggtctcgactcttacctggagccctcccctttgcaaggcccctcgacatggagaggaagaagtccgagcaccctgagtcttccctgtcttcagaagaggagactgccggagtggagaacgtcaagagccagacgtattccaaagatctgctggggcagcagccgcattcggagcccggggccgctgcgtttggggagctccaaaaccagatgcctgggccctcgaaggaggagcagagccttccagcgggtgctcaggaggccctcagcgacggcctgcaattggaggtccagccttccgaggaagaggcgcggggctacatcgtgacagacagagaccccctgcgccccgaggaaggaaggcggctggtggaggacgtcgcccgcctcctgcaggtgcccagcagtgcgttcgctgacgtggaggttctcggaccagcagtgaccttcaaagtgagcgccaatgtccaaaacgtgaccactgaggatgtggagaaggccacagttgacaacaaagacaaactggaggaaacctctggactgaaaattcttcaaaccggagtcgggtcgaaaagcaaactcaagttcctgcctcctcaggcggagcaagaagactccaccaagttcatcgcgctcaccctggtctccctcgcctgcatcctgggcgtcctcctggcctctggcctcatctactgcctccgccatagctctcagcacaggctgaaggagaagctctcgggactagggggcgacccaggtgcagatgccactgccgcctaccaggagctgtgccgccagcgtatggccacgcggccaccagaccgacctgagggcccgcacacgtcacgcatcagcagcgtctcatcccagttcagcgacgggccgatccccagcccctccgcacgcagcagcgcctcatcctggtccgaggagcctgtgcagtccaacatggacatctccaccggccacatgatcctgtcctacatggaggaccacctgaagaacaagaaccggctggagaaggagtgggaagcgctgtgcgcctaccaggcggagcccaacagctcgttcgtggcccagagggaggagaacgtgcccaagaaccgctccctggctgtgctgacctatgaccactcccgggtcctgctgaaggcggagaacagccacagccactcagactacatcaacgctagccctatcatggatcacgacccgaggaaccccgcgtacatcgccacccagggaccgctgcccgccaccgtggctgacttttggcagatggtgtgggagagcggctgcgtggtgatcgtcatgctgacacccctcgcggagaacggcgtccggcagtgctaccactactggccggatgaaggctccaatctctaccacatctatgaggtgaacctggtctccgagcacatctggtgtgaggacttcctggtgaggagcttctatctgaagaacctgcagaccaacgagacgcgcaccgtgacgcagttccacttcctgagttggtatgaccgaggagtcccttcctcctcaaggtccctcctggacttccgcagaaaagtaaacaagtgctacaggggccgttcttgtccaataattgttcattgcagtgacggtgcaggccggagcggcacctacgtcctgatcgacatggttctcaacaagatggccaaaggtgctaaagagattgatatcgcagcgaccctggagcacttgagggaccagagacccggcatggtccagacgaaggagcagtttgagttcgcgctgacagccgtggctgaggaggtgaacgccatcctcaaggcccttccccagtgagcggcagcctcaggggcctcaggggagcccccaccccacggatgttgtcaggaatcatgatctgactttaattgtgtgtcttctattataactgcatagtaatagggcccttagctctcccgtagtcagcgcagtttagcagttaaaagtgtatttttgtttaatcaaacaataataaagagagatttgtggaaaaatccagttacgggtggaggggaatcggttcatcaattttcacttgcttaaaaaaaatactttttcttaaagcacccgttcaccttcttggttgaagttgtgttaacaatgcagtagccagcacgttcgaggcggtttccaggaagagtgtgcttgtcatctgccactttcgggagggtggatccactgtgcaggagtggccggggaagctggcagcaccagtgaggccgcccggcacacaaggcacgtttggcatttctctttgagagagtttatcattgggagaagccgcggggacagaactgaacgtcctgcagcttcggggcaagtgagacaatcacagctcctcgctgcgtctccatcaacactgcgccgggtaccatggacggccccgtcagccacacctgtcagcccaagcagagtgattcaggggctccccggggcagacacctgtgcaccccatgagtagtgcccacttgaggctggcactcccctgacctcacctttgcaaagttacagatgcaccccaacattgagatgtgtttttaatgttaaaatattgatttctacgttatgaaacagatgcccccgtgaatgcttacctgtgagataaccacaccagggaggaacaaatctgggcattgagcaagctatgagggtcccccggggagcaacacgaacccctgccaggcccccgctggctcctccaggcacgtcccggacctgtggggccccagagaggggacatttccctcctgggagagaaggagatcagggcaactcggagagggctgcgagcatttcctcccgggagagatcagggcgacctgcacgcactgcgtagagcctggaagggaagtgagaaaccagccgaccggccctgcccctcttcccgggatcaccttaatgaaccacgtgttttgacatcatgtaaacctaagcacgtagagatgattcggatttgacaaaataacatttgagtatccgattcgccatcaccccctaccccagaaataggacaattcacttcattgaccaggatgatcacatggaaggcggcgcagaggcagctgtgtgggctgcagatttcctgtgtggggttcagcgtagaaaacgcacctccatcccgcccttcccacagcattcctccatcttagatagatggtactctccaaaggccctaccagagggaacacggcctactgagcggacagaatgatgccaaaatattgcttatgtctctacatggtattgtaatgaatatctgctttaatatagctatcatttcttttccaaaattacttctctctatctggaatttaattaatcgaaatgaatttatctgaatataggaagcatatgcctacttgtaatttctaactccttatgtttgaagagaaacctccggtgtgagatatacaaatatatttaattgtgtcatattaaacttctgattcaaaaaaaa

SEQ ID NO: 75 - DNA, 4541 bp, Homo sapiens
ggatcctctagggtcccagctcgcctcgatggagctcctcccgccgctgcctcagtccttcctgttgctgctgctgttgcctgccaagcccgcggcgggcgaggactggcagtgcccgcgcaccccctacgcggcctctcgcgactttgacgtgaagtacgtggtgcccagcttctccgccggaggcctggtacaggccatggtgacctacgagggcgacagaaatgagagtgctgtgtttgtagccatacgcaatcgcctgcatgtgcttgggcctgacctgaagtctgtccagagcctggccacgggccctgctggagaccctggctgccagacgtgtgcagcctgtggcccaggaccccacggccctcccggtgacacagacacaaaggtgctggtgctggatcccgcgctgcctgcgctggtcagttgtggctccagcctgcagggccgctgcttcctgcatgacctagagccccaagggacagccgtgcatctggcagcgccagcctgcctcttctcagcccaccataaccggcccgatgactgccccgactgtgtggccagcccattgggcacccgtgtaactgtggttgagcaaggccaggcctcctatttctacgtggcatcctcactggacgcagccgtggctggcagcttcagcccacgctcagtgtctatcaggcgtctcaaggctgacgcctcgggattcgcaccgggctttgtggcgttgtcagtgctgcccaagcatcttgtctcctacagtattgaatacgtgcacagcttccacacgggagccttcgtatacttcctgactgtacagccggccagcgtgacagatgatcctagtgccctgcacacacgcctggcacggcttagcgccactgagccagagttgggtgactatcgggagctggtcctcgactgcagatttgctccaaaacgcaggcgccggggggccccagaaggcggacagccctaccctgtgctgcaggtggcccactccgctccagtgggtgcccaacttgccactgagctgagcatcgccgagggccaggaagtactatttggggtctttgtgactggcaaggatggtggtcctggcgtgggccccaactctgtcgtctgtgccttccccattgacctgctggacacactaattgatgagggtgtggagcgctgttgtgaatccccagtccatccaggcctccggcgaggcctcgacttcttccagtcgcccagtttttgccccaacccgcctggcctggaagccctcagccccaacaccagctgccgccacttccctctgctggtcagtagcagcttctcacgtgtggacctattcaatgggctgttgggaccagtacaggtcactgcattgtatgtgacacgccttgacaacgtcacagtggcacacatgggcacaatggatgggcgtatcctgcaggtggagctggtcaggtcactaaactacttgctgtatgtgtccaacttctcactgggtgacagtgggcagcccgtgcagcgggatgtcagtcgtcttggggaccacctactctttgcctctggggaccaggttttccaggtacctatccgaggccctggctgccgccacttcctgacctgtgggcgttgcctaagggcatggcatttcatgggctgtggctggtgtgggaacatgtgcggccagcagaaggagtgtcctggctcctggcaacaggaccactgcccacctaagcttactgagttccacccccacagtggacctctaaggggcagtacaaggctgaccctgtgtggctccaacttctaccttcacccttctggtctggtgcctgagggaacccatcaggtcactgtgggccaaagtccctgccggccactgcccaaggacagctcaaaactcagaccagtgccccggaaagactttgtagaggagtttgagtgtgaactggagcccttgggcacccaggcagtggggcctaccaacgtcagcctcaccgtgactaacatgccaccgggcaagcacttccgggtagacggcacctccgtgctgagaggcttctctttcatggagccagtgctgatagcagtgcaacccctctttggcccacgggcaggaggcacctgtctcactcttgaaggccagagtctgtctgtaggcaccagccgggctgtgctggtcaatgggactgagtgtctgctagcacgggtcagtgaggggcagcttttatgtgccacaccccctggggccacggtggccagtgtcccccttagcctgcaggtggggggtgcccaggtacctggttcctggaccttccagtacagagaagaccctgtcgtgctaagcatcagccccaactgtggctacatcaactcccacatcaccatctgtggccagcatctaacttcagcatggcacttagtgctgtcattccatgacgggcttagggcagtggaaagcaggtgtgagaggcagcttccagagcagcagctgtgccgccttcctgaatatgtggtccgagacccccagggatgggtggcagggaatctgagtgcccgaggggatggagctgctggctttacactgcctggctttcgcttcctacccccaccccatccacccagtgccaacctagttccactgaagcctgaggagcatgccattaagtttgagtatattgggctgggcgctgtggctgactgtgtgggtatcaacgtgaccgtgggtggtgagagctgccagcacgagttccggggggacatggttgtctgccccctgcccccatccctgcagcttggccaggatggtgccccattgcaggtctgcgtagatggtgaatgtcatatcctgggtagagtggtgcggccagggccagatggggtcccacagagcacgctccttggtatcctgctgcctttgctgctgcttgtggctgcactggcgactgcactggtcttcagctactggtggcggaggaagcagctagttcttcctcccaacctgaatgacctggcatccctggaccagactgctggagccacacccctgcctattctgtactcgggctctgactacagaagtggccttgcactccctgccattgatggtctggattccaccacttgtgtccatggagcatccttctccgatagtgaagatgaatcctgtgtgccactgctgcggaaagagtccatccagctaagggacctggactctgcgctcttggctgaggtcaaggatgtgctgattccccatgagcgggtggtcacccacagtgaccgagtcattggcaaaggccactttggagttgtctaccacggagaatacatagaccaggcccagaatcgaatccaatgtgccatcaagtcactaagtcgcatcacagagatgcagcaggtggaggccttcctgcgagaggggctgctcatgcgtggcctgaaccacccgaatgtgctggctctcattggtatcatgttgccacctgagggcctgccccatgtgctgctgccctatatgtgccacggtgacctgctccagttcatccgctcacctcagcggaaccccaccgtgaaggacctcatcagctttggcctgcaggtagcccgcggcatggagtacctggcagagcagaagtttgtgcacagggacctggctgcgcggaactgcatgctggacgagtcattcacagtcaaggtggctgactttggtttggcccgcgacatcctggacagggagtactatagtgttcaacagcatcgccacgctcgcctacctgtgaagtggatggcgctggagagcctgcagacctatagatttaccaccaagtctgatgtgtggtcatttggtgtgctgctgtgggaactgctgacacggggtgccccaccataccgccacattgacccttttgaccttacccacttcctggcccagggtcggcgcctgccccagcctgagtattgccctgattctctgtaccaagtgatgcagcaatgctgggaggcagacccagcagtgcgacccaccttcagagtactagtgggggaggtggagcagatagtgtctgcactgcttggggaccattatgtgcagctgccagcaacctacatgaacttgggccccagcacctcgcatgagatgaatgtgcgtccagaacagccgcagttctcacccatgccagggaatgtacgccggccccggccactctcagagcctcctcggcccacttgacttagttcttgggctggacctgcttagctgccttgagctaaccccaaggctgcctctgggccatgccaggccagagcagtggccctccaccttgttcctgccctttaactttcagaggcaataggtaaatgggcccattaggtccctcactccacagagtgagccagtgagggcagtcctgcaacatgtatttatggagtgcctgctgtggaccctgtcttctgggcacagtggactcagcagtgaccacaccaacactgacccttgaaccaataaaggaacaaatgactattaaagcacaaaaaaaaaa

SEQ ID NO: 76 - DNA, 1662 bp, Homo sapiens
ccgagttacgagtcggcgaaagcggcgggaagttcgtactgggcagaacgcgacgggtctgcggcttaggtgaaaatgcctcgtgtaaaagcagctcaagctggaagacagagctctgcaaagagacatcttgcagaacaatttgcagttggagagataataactgacatggcaaaaaaggaatggaaagtaggattacccattggccaaggaggctttggctgtatatatcttgctgatatgaattcttcagagtcagttggcagtgatgcaccttgtgttgtaaaagtggaacccagtgacaatggacctctttttactgaattaaagttctaccaacgagctgcaaaaccagagcaaattcagaaatggattcgtacccgtaagctgaagtacctgggtgttcctaagtattgggggtctggtctacatgacaaaaatggaaaaagttacaggtttatgataatggatcgctttgggagtgaccttcagaaaatatatgaagcaaatgccaaaaggttttctcggaaaactgtcttgcagctaagcttaagaattctggatattctggaatatattcacgagcatgagtatgtgcatggagatatcaaggcctcaaatcttcttctgaactacaagaatcctgaccaggtgtacttggtagattatggccttgcttatcggtactgcccagaaggagttcataaagaatacaaagaagaccccaaaagatgtcacgatggcactattgaattcacgagcatcgatgcacacaatggtgtggccccatcaagacgtggtgatttggaaatacttggttattgcatgatccaatggcttactggccatcttccttgggaggataatttgaaagatcctaaatatgttagagattccaaaattagatacagagaaaatattgcaagtttgatggacaaatgttttcctgagaaaaacaaaccaggtgaaattgccaaatacatggaaacagtgaaattactagactacactgaaaaacctctttatgaaaatttacgtgacattcttttgcaaggactaaaagctataggaagtaaggatgatggcaaattggacctcagtgttgtggagaatggaggtttgaaagcaaaaacaataacaaagaagcgaaagaaagaaattgaagaaagcaaggaacctggtgttgaagatacggaatggtcaaacacacagacagaggaggccatacagacccgttcaagaaccagaaagagagtccagaagtaattcagatgctgtgaaccagatttccttttctttgttttcttttgacttttttctccttttctgttagaactgttttattttcctgtgagtcttgcgaggtggaattaatgattaaatactcatgtgttcagaaaacataaactttttttataaaaatattttgtacaattcattaaaggctaatttatgaaatttgaaaatcttcaggttatactccttaagttatcccaaagccgtgtgtttgtgatgttttggagtacatatatatgaaaattattatgacacgcacttttctaatcattgtacatttctcagagtggataaaaatgtttgacaaagtcctcacttttaaggaaatgcaaagcttaaaataaaactctcttttgtttgatgcag

SEQ ID NO: 77 - DNA, 4221 bp, Homo sapiens
gtcggccgtcccctttaatttttaaatacacggtcccctcttttctctggggggggcaagcaagaaatcaaagaaggaggagacaagccgtcaattttctccaaaacaaaccccaccgggcaatttggtctcggggtagggggagacggggtgattgcaaattattccaggacgagatccagttctccagcgggaaaggggcaaaggaacgccgcgcgttggaagggccagggtacgcagctccccttgcagcgcccgcaggacccccgcaagctcgtgccggcgaaatcggagaccgccgatctgtcctcgttctctcctgcacgtctggctgcattcggaggaagacctggggcgcgagcgagcggcgacagcatgagcctgtgctgacctccgcgcggcgggccgagcccagggctttgtcgcggtacctgcgcccagcccgcgccgcaactctgtgcccagcttttgcaatcttttgttgcagcgctgaccgcaccaagttaaatgctcccttgcaatttttcttttttttgtttgtttgtttaatttttggagagctcgcgatcttggaaaagcctcagacgccatctacagttaaaacgtaggtaactgccctctcccgcaccccccccttacacgccccccaccctttccaccaaaaaaagggggtgcagcgcggattctggctgccgtgcgtcgccagccggtagacccgtgcttgtttcctttctctttttgtttggcttctaacgcgttgggactgagtcgccgccgtgagctccccgaagactgcacaaactaccgcgggctcctccgccccgtctgcgattcggaagccggcctgggggtcgcgtcgggagccctgcgctgcagctccgcaccttagcagcccgggtactcatccagatccacgccggggacacacacacagagtaactaaaagtgcggcgattctgcacatcgccgactgctttggggtaacaaaaagacccgagttgcctgccgaccgaggacccccgggagccgggctcggagcagacgaggtatccggcggcgcccatttgggggcttctaactctttctccacgcagcccctcttctgtcccctcccctctcgctcccttttaaaatcagtggcaccgaggcgcctgcagccgcactcgccagcgactcatctctccagcgggtttttttttgtttgtcgtgtgcgatcctcacactcatgaacatacacaggtctacccccatcacaatagcgagatatgggagatcgcggaacaaaacccaggatttcgaagagttgtcgtctataaggtccgcggagcccagccagagtttcagcccgaacctcggctccccgagcccgcccgagactccgaacttgtcgcattgcgtttcttgtatcgggaaatacttattgttggaacctctggagggagaccacgtttttcgtgccgtgcatctgcacagcggagaggagctggtgtgcaaggtgtttgatatcagctgctaccaggaatccctggcaccgtgcttttgcctgtctgctcatagtaacatcaaccaaatcactgaaattatcctgggtgagaccaaagcctatgtgttctttgagcgaagctatggggacatgcattccttcgtccgcacctgcaagaagctgagagaggaggaggcagccagactgttctaccagattgcctcggcagtggcccactgccatgacggggggctggtgctgcgggacctcaagctgcggaaattcatctttaaggacgaagagaggactcgggtcaagctggaaagcctggaagacgcctacattctgcggggagatgatgattccctctccgacaagcatggctgcccggcttacgtaagcccagagatcttgaacaccagtggcagctactcgggcaaagcagccgacgtgtggagcctgggggtgatgctgtacaccatgttggtggggcggtaccctttccatgacattgaacccagctccctcttcagcaagatccggcgtggccagttcaacattccagagactctgtcgcccaaggccaagtgcctcatccgaagcattctgcgtcgggagccctcagagcggctgacctcgcaggaaattctggaccatccttggttttctacagattttagcgtctcgaattcagcatatggtgctaaggaagtgtctgaccagctggtgccggacgtcaacatggaagagaacttggaccctttctttaactgagctcatgccccacggagacttagcaggttccaggagtgagcgagggcagcggaaaggagttcttccgggggacacgaattgcctggctgagtagcaagaaagacacactcttaagtttcttggttcagagcaggaaaaccttcaaggagctgactgaccacgtagcatgggggcaagaggcgtgggatggggattggggtgagatggatgggagcccgctggagcttgtcttccctaacatagcctgggagaccaccccttgccacttgggccacttccgcctaccccacttttcattttgttccaaaatagttgcagatcctgacagaatcaaaactctctgcctcaaacacacatcctggcatcgcactgttagcatttaacttcttgttaggattcagggaaggaacagttggccaagaattttttttcttttaaacaagccaaccacctagctggtaattaatgaggttcacttaaaaaaaaaattcggtgcacacagactgacatgaaacctgggtgctacagtaaaagaaaacaaaagtccagtttgtgtctcttaatcgctcacttcaactcatttcttctaaataaactatttaatatcctggtcaggaaatgacatgttaatgctttgctccctgaagggggaaaaaatctgtcctttaacaagctattctgttttgtgtcaattgggtccgtggcaaggaagctattaggaagtcaaacggtccaggatgcattacctgctaatccttaggtttaaagggggaaagaaaagggaagaagaaaggaaaagagaaatccaactcctttttcatgttttgcttttgaacaatgagggtttgtgtgacaggcattcctctttgctgagatgatagcaatggcctgagattttagcaagctcctggagtctgatgcttttgcagtactctgatcgcaactaaacatttgtctttgttttattagaaactagtgaaacaaagcaggttgtcccacatgtataaaatacagggcagctatttagttttctttacagagaatgatccttttaaggcttgtaaggccctctggtttggacaaaaaccctcagtagagacaagcgggaaggataattagctgaaagctatgatgatataaataaaaacagctctctatcccaatacgcacctttgtattttcaagaactcttctatttattaaggaaaatgtcacattgtgatgtattaagccagtacttcaattacgggttgacttgggatgacatattacatgctgtagttaacatttataattctttttccttgtttgagtatttctgtctctgaaataaccttttacttggcttttctagatagctttatttgatttcgagtggcaaaatgttttttattacggcttttctattgctgtatgatacagaactcttttggcataaatatttgtgttcccagtacctcacttgttcggatttgactgcctgtatatgttttgtgaaatggtcctgtttttgggtaggtgacacgtggactctagtatgtaaatgttacttgaatctgtgcttcataatagtgtgtggcatgtatgtgcagactcttggatgctttatgcctgcgcaccaggagccctgtcctcacgttcccaggagggcggcttcacccttcgtaaccaggagacaaggcggccatggatttgcccttgattctattttgctaatggaagatagaaaggagagaaggtttttttttttttttaacattctgaagatggtgctgtgtcaagaaggaccttttttttcccctctcccctattttttaagtaccttggaggaggagaggttggtgacatgcatggtggggatctatggcctctggtgctttgtcctgtatttggtttaatgtttttgtcctaatctcttcaatcaataaaattgtgcgtatttaactaaaaaaaaaaaaaaaaaa

SEQ ID NO: 78 - DNA, 5433 bp, Homo sapiens
ggggagattcgggaccatggcacctgtgcacggcgacgactctctgtcagattcagggagttttgtatcttctcgagcccggcgagaaaaaaaatcaaagaaggggcgccaagaagccctagaaagactgaaaaaggctaaagctggtgagaagtataaatatgaagtcgaggacttcacaggtgtttatgaagaagttgatgaagaacagtattcgaagctggttcaggcacgccaggatgatgactggattgtggatgatgatggtattggctatgtggaagatggccgagagatttttgatgatgaccttgaagatgatgcccttgatgctgatgagaaaggaaaagatggtaaagcacgcaataaagacaagaggaatgtaaagaagctcgcagtgacaaaaccgaacaacattaagtcaatgttcattgcttgtgctggaaagaaaactgcagataaagctgtagacttgtccaaggatggtctgctaggtgacattctacaggatcttaacactgagacacctcaaataactccaccacctgtaatgatactgaagaagaaaagatccattggagcttcaccgaatcctttctctgtgcacaccgccacggcagttccttcaggaaaaattgcttcccctgtctccagaaaggagcctccattaactcctgttcctcttaaacgtgctgaatttgctggcgatgatgtacaggtcgagagtacagaagaagagcaggagtcaggggcaatggagtttgaagatggtgactttgatgagcccatggaagttgaagaggtggacctggagcctatggctgccaaggcttgggacaaagagagtgagccagcagaggaagtgaaacaagaggcggattctgggaaagggaccgtgtcctacttaggaagttttctcccggatgtctcttgttgggacattgatcaagaaggtgatagcagtttctcagtgcaagaagttcaagtggattccagtcacctcccattggtaaaaggggcagatgaggaacaagtattccacttttattggttggatgcttatgaggatcagtacaaccaaccaggtgtggtatttctgtttgggaaagtttggattgaatcagccgagacccatgtgagctgttgtgtcatggtgaaaaatatcgagcgaacgctttacttccttccccgtgaaatgaaaattgatctaaatacggggaaagaaacaggaactccaatttcaatgaaggatgtttatgaggaatttgatgagaaaatagcaacaaaatataaaattatgaagttcaagtctaagccagtggaaaagaactatgcttttgagatacctgatgttccagaaaaatctgagtacttggaagttaaatactcggctgaaatgccacagcttcctcaagatttgaaaggagaaactttttctcatgtatttgggaccaacacatctagcctggaactgttcttgatgaacagaaagatcaaaggaccttgttggcttgaagtaaaaaagtccacagctcttaatcagccagtcagttggtgtaaagttgaggcaatggctttgaaaccagacctggtgaatgtaattaaggatgtcagtccaccaccgcttgtcgtgatggctttcagcatgaagacaatgcagaatgcaaagaaccatcaaaatgagattattgctatggcagctttggtccatcacagttttgcattggataaagcagccccaaagcctccctttcagtcacacttctgtgttgtgtctaaaccaaaggactgtatttttccatatgctttcaaagaagtcattgagaaaaagaatgtgaaggttgaggttgctgcaacagaaagaacactgctaggttttttccttgcaaaagttcacaaaattgatcctgatatcattgtgggtcataatatttatgggtttgaactggaagtactactgcagagaattaatgtgtgcaaagctcctcactggtccaagataggtcgactgaagcgatccaacatgccaaagcttgggggccggagtggatttggtgaaagaaatgctacctgtggtcgaatgatctgtgatgtggaaatttcagcaaaggaattgattcgttgtaaaagctaccatctgtctgaacttgttcagcagattctaaaaactgaaagggttgtaatcccaatggaaaatatacaaaatatgtacagtgaatcttctcaactgttatacctgttggaacacacctggaaagatgccaagttcattttgcagatcatgtgtgagctaaatgttcttccattagcattgcagatcactaacatcgctgggaacattatgtccaggacgctgatgggtggacgatccgagcgtaacgagttcttgttgcttcatgcattttacgaaaacaactatattgtgcctgacaagcagattttcagaaagcctcagcaaaaactgggagatgaagatgaagaaattgatggagataccaataaatacaagaaaggacgtaagaaaggagcttatgctggaggcttggttttggaccccaaagttggtttttatgataagttcattttgcttctggacttcaacagtctatatccttccatcattcaggaatttaacatttgttttacaacagtacaaagagttgcttcagaggcacagaaagttacagaggatggagaacaagaacagatccctgagttgccagatccaagcttagaaatgggcattttgcccagagagatccggaaactggtagaacggagaaaacaagtcaaacagctaatgaaacagcaagacttaaatccagaccttattcttcagtatgacattcgacagaaggctttgaagctcacagcgaacagtatgtatggttgcctgggattttcctatagcagattttacgccaaaccactggctgccttggtgacatacaaaggaagggagattttgatgcatacgaaagagatggtacaaaagatgaatcttgaagttatttatggagatacagattcaattatgataaacaccaatagcaccaatctggaagaagtatttaagttgggaaacaaggtaaaaagtgaagtgaataagttgtacaaactgcttgaaatagacattgatggggttttcaagtctctgctactgctgaaaaaaaagaagtacgctgctctggttgttgagccaacgtcggatgggaattatgtcaccaaacaggagctcaaaggattagatatagttagaagagattggtgtgatcttgctaaagacactggaaactttgtgattggccagattctttctgatcaaagccgggacactatagtggaaaacattcagaagaggctgatagaaattggagaaaatgtgctaaatggcagtgtcccagtgagccagtttgaaattaacaaggcattgacaaaggatccccaggattaccctgataaaaaaagcctacctcatgtacatgttgccctctggataaattctcaaggaggcagaaaggtgaaagctggagatactgtgtcatatgtcatctgtcaggatggatcaaacctcactgcaagtcagagggcctatgcgcctgagcagctgcagaaacaggataatctaaccattgacacccagtactacctggcccagcagatccacccagtcgtggctcggatctgtgaaccaatagacggaattgatgctgtcctcattgcaacgtggttgggacttgaccccacccaatttagagttcatcattatcataaagatgaagagaatgatgctctacttggtggcccagcacagctcactgatgaagagaaatacagggactgtgaaagattcaaatgtccatgccctacatgtggaactgagaatatttatgataatgtctttgatggttcgggaacagatatggagcccagcttgtatcgttgcagtaacatcgattgtaaggcttcacctctgacctttacagtacaactgagcaacaaattgatcatggacattagacgtttcattaaaaagtactatgatggctggttgatatgtgaagagccaacctgtcgcaatcgaactcgtcaccttccccttcaattctcccgaactgggcctctttgcccagcctgcatgaaagctacacttcaaccagagtattctgacaagtccctgtacacccagctgtgcttttaccggtacatttttgatgcggagtgtgcactggagaaacttactaccgatcatgagaaagataaattgaagaagcaattttttacccccaaagttctgcaggactacagaaaactcaagaacacagcagagcaattcttgtcccgaagtggctactccgaagtgaatctgagcaaactcttcgctggttgtgccgtgaaatcctaagggaatcccaggagtaaccaaggagggggtagttgaaaaatcccagcttcctctgtgcctccactctggccctaaatgctcctccagcatctgtttctcccttgggactgtgtctcatgtttgtgtgaatgtagaccaggaaagggggctgcaaaaatgttgagtctaatgttcgtaagcatcatagaaattcctgtcttcatattaagatgtactgctttaaaacacaactccagagcccctccccaagctcccctccccaagctcctgaagacccggtttctgagggagggaaattgctacttggattgagagtagctggaatgtaagtgaccccaggctttgctcagggcctttagcctatgtcccccccacataaagagagcttctcagagcctgactgaagagctgacgttttgctttttcatatgccaattaaacccggtctaaatccaaatgcttctccagccatccaggagtggctgtccttttcagtcttgtcttttatataggtagctgagggggaagatttagaagccttgcactcactaaatagattaaacagagcaggcttgtttgttgaattgctccaaagtccaacagacacacactgagcaggtgttttacactcacattccctttttgccccttaaatagaaagtgcaggtaaaggtttatacaacaagaaagcacattgaaaataatttgatactctaacaatccattaacatgtgtaggggttacggtgaggatcatgtgttgtattcgaaaaacggggagagggatgcttaattggccctcgcttgctatttttttctcatttcttcacaataggaccgtctttggcagcagcaaaatgtatttcagtatggcagtctttcctctcttacattattggtaagattatactaacaaaatgtttccccttgtacaattatgctgtgtttttaaaaaacattgacctgtgtgtttttataaaagaaaaagtatgttgtgccttcttcttaagaataaagttttctaaaggg

SEQ ID NO: 79 - DNA, 3236 bp, Homo sapiens
cgtgggagcagtggggttcgacggcgcggccgcgaggccgccatggccgctcacgggaagctgcggcgggagcgggggctgcaggctgagtatgagacgcaagtcaaagagatgcgctggcagctgagcgagcagctgcgctgcctggagctgcagggcgagctgcggcgggagttgctgcaggagctggcagagttcatgcggcgccgcgctgaggtggagctggaatactcccggggcctggaaaagctggccgagcgcttctccagccgtggaggccgcctggggagcagccgggagcaccaaagcttccggaaggagccgtccctcctgtcgcccttgcactgctgggcggtgctgctgcagcacacgcggcagcagagccgggagagcgcggccctgagtgaggtgctggccgggcccctggcccagcgcctgagtcacattgcagaggacgtggggcgcctggtcaagaagagcagggatctggagcagcagctgcaggatgagctcctggaggtggtctcagagctccagacggccaagaagacgtaccaggcatatcacatggagagcgtgaatgccgaggccaagctccgggaggccgagcggcaggaggagaagcgggcaggccggagtgtccccaccaccaccgctggtgccactgaggcagggcccctccgcaagagctccctcaagaagggagggaggctggtggagaagcggcaggccaagttcatggagcacaaactcaagtgcacaaaggcgcgcaacgagtacctgcttagcctggctagtgtcaacgctgctgtcagtaactactacctgcatgacgtcttggacctcatggactgctgtgacacagggttccacctggccctggggcaggtgctccggagctacacggccgctgagagccgcacccaagcctcccaagtgcagggcctgggcagcctggaagaagctgtggaggccctggatcctccaggggacaaagccaaggttctcgaggtgcatgctaccgtcttctgtcccccgctgcgctttgactaccacccccatgatggggatgaggtggctgagatctgcgttgaaatggagctgcgggacgagattctgcccagagcccagaacatccagagccgcctggaccgacagaccattgagacagaggaggtgaacaagactctgaaggcgacactgcaggccctgctggaggtggtggcctcggatgacggggatgtgcttgattccttccagaccagcccctccaccgagtccctcaagtccaccagctcagacccaggcagccggcaggcgggccggaggcgcggccagcagcaggagaccgaaaccttctacctcacgaagctccaggagtatctgagtggacggagcatcctcgccaagctgcaggccaagcacgagaagctgcaggaggcccttcagcgaggtgacaaggaggagcaggaggtgtcttggacccagtacacacagagaaaattccagaagagccgccagccccgccccagctcccagtataaccagagactctttgggggagacatggagaagtttatccagagctcaggccagcctgtgcccctggtggtggagagctgcattcgcttcatcaacctcaatggcctgcagcatgaaggcatcttccgggtatcgggtgcccagctccgggtctcagagatccgtgatgccttcgagagaggggaggacccactggtggagggctgcactgcccatgacctggactcggtggccggggtgctgaagctctacttccggagcctggagcccccactcttccccccagacctgttcggcgagctgctggcttcttcggagctggaggacacagcggagagggtggagcacgtgagccgcctgctgtggcggctgcccgcgccggtgctggtggttctgcgctacctcttcaccttcctcaaccacctggcccagtacagcgatgagaacatgatggacccctacaacctggccgtgtgcttcgggcccacgctgctaccggtgcccgctgggcaggacccggtggcgctgcagggccgggtgaaccagctggtgcagacgctcatagtgcagcccgatcgggtcttcccgcccctgacctcgctgcctggccccgtctacgagaagtgcatggcaccgccttccgccagctgcctgggggacgcccagctggagagcctgggggcggacaatgatccggagctggaagccgagatgcccgcacaggaggatgacctggagggggtcgtggaggctgtggcctgctttgcctacacgggccgcacagcccaggagctgagcttccggcggggggacgtactgcggctgcacgagagggcctcgagcgactggtggcggggggagcacaacggcatgcggggcctcatcccccacaagtatatcacgctgcccgccgggacggagaagcaggtggtgggcgcagggctgcagactgcaggggagtctgggagcagtcccgagggcctcctggcatcggagctggtccaccggccagagccatgcacctcacctgaggccatgggaccctctggacacagacgacgctgcttggtcccagcctccccagagcaacacgtggaggtggataaggctgtggcacagaacatggactctgtgtttaaggagctcttgggaaagacctctgtccgccagggccttgggccagcatctaccacctctcccagtcctgggccccgaagcccaaaggccccgcccagcagccgcctgggcaggaacaaaggcttctcccggggccctggggccccagcctcaccctcagcttcccacccccagggcctagacacgacccccaagccacactgaggtgccgctgctggagatgcgtgcccccggcggctacccgctggaccggccactctccccagcccccttgcttctctccagccctgtccagcaagtgcagggtgcctgcacttcaccctgtgcagagaggtgggatggggccgtgcacacagggtatgcccgctccacatcctgcctgcccctcagccctggcccaggccccttgtggaggcagctgaggaaggatgctggggaaagccctcttctgcagctttgtggaaggctgatcagtggctgctgggtggcgggtacccttgctcagatgcctggcagggctgggtggcgattcataaagacctcgtgttgattccccg

SEQ ID NO: 80 - DNA, 1578 bp, Homo sapiens
ccagcaccaactacccagtggagtgcaccgaggggtctgcaggcccccagtctctccccttgcctattctggagccggtcaaaaacccctgctctgtcaaagaccagacgccactccaactttctgtagaagataccacctctccaaataccaagccgtgcccacctactcccaccaccccagaaacatcccctcctcctcctcctcctcctccttcatctactccttgttcagctcacctgaccccctcctccctgttcccttcctccctggaatcatcatcggaacagaaattctataactttgtgatcctccacgccagggcagacgaacacatcgccctgcgggttcgggagaagctggaggcccttggcgtgcccgacggggccaccttctgcgaggatttccaggtgccggggcgcggggagctgagctgcctgcaggacgccatagaccactcagctttcatcatcctacttctcacctccaacttcgactgtcgcctgagcctgcaccaggtgaaccaagccatgatgagcaacctcacgcgacaggggtcgccagactgtgtcatccccttcctgcccctggagagctccccggcccagctcagctccgacacggccagcctgctctccgggctggtgcggctggacgaacactcccagatcttcgccaggaaggtggccaacaccttcaagccccacaggcttcaggcccgaaaggccatgtggaggaaggaacaggacacccgagccctgcgggaacagagccaacacctggacggtgagcggatgcaggcggcggcactgaacgcagcctactcagcctacctccagagctacttgtcctaccaggcacagatggagcagctccaggtggcttttgggagccacatgtcatttgggactggggcgccctatggggctcgaatgccctttgggggccaggtgcccctgggagccccgccaccctttcccacttggccggggtgcccgcagccgccacccctgcacgcatggcaggctggcacccccccaccgccctccccacagccagcagcctttccacagtcactgcccttcccgcagtccccagccttccctacggcctcacccgcaccccctcagagcccagggctgcaacccctcattatccaccacgcacagatggtacagctggggctgaacaaccacatgtggaaccagagagggtcccaggcgcccgaggacaagacgcaggaggcagaatgaccgcgtgtccttgcctgaccacctggggaacacccctggacccaggcatcggccaggaccccatagagcaccccggtctgccctgtgccctgtggacagtggaagatgaggtcatctgccactttcaggacattgtccgggagcccttcatttaggacaaaacgggcgcgatgatgccctggctttcagggtggtcagaactggatacggtgtttacaattccaatctctctatttctgggtgaagggtcttggtggtgggggtattgctacggtcttttaattataataaatatttattgaatgctaaaaaaaaaaaaaaaaaa

SEQ ID NO: 81 - DNA, 3817 bp, Homo sapiens
tgaattcgtgagagacttgagggaggcgctgcgactgacaagcggctctgcccgggaccttctcgctttcatctagcgctgcactcaatggaggggcgggcaccgcagtgcttaatgctgtcttaactagtgtaggaaaacggctcaacccaccgctgccgaaatgaagtataagaatcttatggcaagggccttatatgacaatgtcccagagtgtgccgaggaactggcctttcgcaagggagacatcctgaccgtcatagagcagaacacagggggactggaaggatggtggctgtgctcgttacacggtcggcaaggcattgtcccaggcaaccgggtgaagcttctgattggtcccatgcaggagactgcctccagtcacgagcagcctgcctctggactgatgcagcagacctttggccaacagaagctctatcaagtgccaaacccacaggctgctccccgagacaccatctaccaagtgccaccttcctaccaaaatcagggaatttaccaagtccccactggccacggcacccaagaacaagaggtatatcaggtgccaccatcagtgcagagaagcattgggggaaccagtgggccccacgtgggtaaaaaggtgataacccccgtgaggacaggccatggctacgtatacgagtacccatccagataccaaaaggatgtctatgatatccctccttctcataccactcaaggggtatacgacatccctccctcatcagcaaaaggccctgtgttttcagttccagtgggagagataaaacctcaaggggtgtatgacatcccgcctacaaaaggggtatatgccattccgccctctgcttgccgggatgaagcagggcttagggaaaaagactatgacttcccccctcccatgagacaagctggaaggccggacctcagaccggagggggtttatgacattcctccaacctgcaccaagccagcagggaaggaccttcatgtaaaatacaactgtgacattccaggagctgcagaaccggtggctcgaaggcaccagagcctgtccccgaatcacccacccccgcaactcggacagtcagtgggctctcagaacgacgcatatgatgtcccccgaggcgttcagtttcttgagccaccagcagaaaccagtgagaaagcaaacccccaggaaagggatggtgtttatgatgtccctctgcataacccgccagatgctaaaggctctcgggacttggtggatgggatcaaccgattgtctttctccagtacaggcagcacccggagtaacatgtccacgtcttccacctcctccaaggagtcctcactgtcagcctccccagctcaggacaaaaggctcttcctggatccagacacagctattgagagacttcagcggctccagcaggcccttgagatgggtgtctccagcctaatggcactggtcactaccgactggcggtgttacggatatatggaaagacacatcaatgaaatacgcacagcagtggacaaggtggagctgttcctgaaggagtacctccactttgtcaagggagctgttgcaaatgctgcctgcctcccggaactcatcctccacaacaagatgaagcgggagctgcaacgagtcgaagactcccaccagatcctgagtcaaaccagccatgacttaaatgagtgcagctggtccctgaatatcttggccatcaacaagccccagaacaagtgtgacgatctggaccggtttgtgatggtggcaaagacggtgcccgatgacgccaagcagctcaccacaaccatcaacaccaacgcagaggccctcttcagacccggccctggcagcttgcatctgaagaatgggccggagagcatcatgaactcaacggagtacccacacggtggctcccagggacagctgctgcatcctggtgaccacaaggcccaggcccacaacaaggcactgcccccaggcctgagcaaggagcaggcccctgactgtagcagcagtgatggttctgagaggagctggatggatgactacgattacgtccacctacagggtaaggaggagtttgagaggcaacagaaagagctattggaaaaagagaatatcatgaaacagaacaagatgcagctggaacatcatcagctgagccagttccagctgttggaacaagagattacaaagcccgtggagaatgacatctcgaagtggaagccctctcagagcctacccaccacaaacagtggcgtgagtgctcaggatcggcagttgctgtgcttctactatgaccaatgtgagacccatttcatttcccttctcaacgccattgacgcactcttcagttgtgtcagctcagcccagcccccgcgaatcttcgtggcacacagcaagtttgtcatcctcagtgcacacaaactggtgttcattggagacacgctgacacggcaggtgactgcccaggacattcgcaacaaagtcatgaactccagcaaccagctctgcgagcagctcaagactatagtcatggcaaccaagatggccgccctccattaccccagcaccacggccctgcaggaaatggtgcaccaagtgacagacctttctagaaatgcccagctgttcaagcgctctttgctggagatggcaacgttctgagaagaaaaaaaagaggaaggggactgcgttaacggttactaaggaaaactggaaatactgtctggtttttgtaaatgttatctatttttgtagataattttatataaaaatgaaatattttaacattttatgggtcagacaactttcagaaattcagggagctggagagggaaatctttttttcccccctgagtgttcttatgtatacacagaagtatctgagacataaactgtacagaaaacttgtccacgtccttttgtatgcccatgtattcatgtttttgtttgtagatgtttgtctgatgcatttcattaaaaaaaaaaccatgaattacgaagcaccttagtaagcaccttctaatgctgcattttttttgttgttgttaaaaacatccagctggttataatattgttctccacgtccttgtgatgattctgagcctggcactgggaatctgggaagcatagtttatttgcaagtgttcaccttccaaatcatgaggcatagcatgacttattcttgttttgaaaactcttttcaaaactgaccatcttaaacacatgatggccaagtgccacaaagccctcttgcggagacatttacgaatatatatgtggatccaagtctcgatagttaggcgttggagggaagagagaccagagagtttagaggccaggaccacagttaggattgggttgtttcaatactgagagacagctacaataaaaggagagcaattgcctccctggggctgttcaatcttctgcatttgtgagtggttcagtcatgaggttttccaaaagatgtttttagagttgtaaaaaccatatttgcagcaaagatttacaaaggcgtatcagactatgattgttcaccaaaataggggaatggtttgatccgccagttgcaagtagaggcctttctgactcttaatattcactttggtgctactacccccattacctgaggaactggccaggtccttgatcatggaactatagagctaccagacatatcctgctctctaagggaatttattgctatcttgcaccttctttaaaactcaaaaaacatatgcagacctgacactcaagagtggctagctacacagagtccatctaatttttgcaacttccccccccgaattc

SEQ ID NO: 82 - DNA, 1877 bp, Homo sapiens
gaagtgtacctcgagattcaggagcaatgcttggcttgaaggttgtaggaggaaagatgactgaatcaggtcggctttgtgcatttattactaaagtaaaaaaaggaagtttagctgatactgtaggacatcttagaccaggtgatgaagtattagaatggaatggaagactactgcaaggagccacatttgaggaagtgtacaacatcattctagaatccaaacctgaaccacaagtagaacttgtagtttcaaggcctattggagatataccgcgaatacctgatagcacacatgcacaactggagtccagttctagctcctttgaatctcaaaaaatggatcgtccttctatttctgttacctctcccatgagtcctggaatgttgagggatgtcccacagttcttatcaggacaactttcaataaaactatggtttgacaaggttggtcaccaattaatagttacaattttgggagcaaaagatctcccttccagggaagatgggaggccaaggaatccttatgttaaaatttactttcttccagacagaagtgataaaaacaagagaagaactaaaacagtaaagaaaacattggaacccaaatggaaccaaacattcatttattctccagtccaccgaagagaatttcgggaacgaatgctagagattaccctttgggatcaagctcgtgttcgagaggaagaaagtgaattcttaggcgagattttaattgaattagaaacagcattattagatgatgagccacattggtacaaacttcagacgcatgatgtctcttcattgccacttccccacccttctccatatatgccacgaagacagctccatggagagagcccaacacggaggttgcaaaggtcaaagagaataagtgatagtgaagtctctgactatgactgtgatgatggaattggtgtagtatcagattatcgacatgatggtcgagatcttcaaagctcaacattatcagtgccagaacaagtaatgtcatcaaaccactgttcaccatcagggtctcctcatcgagtagatgttataggaaggactagatcatggtcacccagtgtccctcctccacaaaggtaagatagactacttattttatttgtagggtggctatattagtcagtgttctccagagggacaaaactaataggatatatgtatatatgaaagggagtttattagggagaattggctcatatgattataagacaaagtcccaccatagaatttctgcaagctggggaagggagaagccagtagtggcttagtccaagtgtgagtccattttgaaaggcttaaaaccagggaagctgacaggacaggcttcagtctgtggtcaaaggcctgagagccaccagcaagccactggtgcaagttccagagtccaaaggccaaagaacctagtgttggatgtccaagggcaggaagagtgaaaggaatcatccagcacaggaaaaagaaagaagccagaaaacttagcaagcaaggttatcccaccttcttcacccgctttgttccagctgcattggcagccgactggatggtggattgggtgagtcttcctctcctagtccacatattcaaatgtcagtctcctctggcaacaccttacagacacatctagaaacaatactttaccagcctaggcttccttcattccattcaagttgacacgtaatgttaaccatcaaaatggcattacagacctatttatcacatatcggtaataatctctaaagataagagattcttgtggaaaaagaatttaaggaaagcaagatggttttgtttatttaaggaaaaacaaaatgctattcaaggaaaaaaaaaaaaaaaaaaaaaaaa

SEQ ID NO: 83 - DNA, 4153 bp, Homo sapiens
aagaaatagaacagaattcagccatggccccaagaaagagaggtggacgaggtatttcattcatcttttgctgtttccgaaataatgatcacccagaaatcacgtatcggctgcgaaatgatagcaactttgcgcttcagaccatggaaccagcattgcccatgccccctgtggaggagctggatgtcatgttcagtgaactggtggatgaactggacctcacagacaaacacagagaagccatgtttgcacttccagctgagaaaaaatggcaaatatactgtagcaagaaaaaggaccaggaagaaaacaagggagctacaagttggcctgaattctacattgatcagctcaattccatggctgctagaaaatctctgctggctttagagaaggaagaagaagaagaaagaagtaaaactatagagagtttaaagacagcactgaggacaaaaccaatgaggtttgtaaccagattcatcgacttggatggcctatcatgtatcctcaactttctaaagaccatggactacgagacctcagagtctcgaatacatacttctctcattggctgtataaaggcgttaatgaacaactctcaaggccgggctcacgtcctggctcattctgagagtattaatgtaattgctcagagtctgagcacagagaacattaaaacgaaggtggccgtgctggaaatcttgggcgccgtgtgcctggttcccgggggccacaagaaggttctgcaggccatgctgcactaccagaagtatgccagcgaaaggacccgctttcagacattaattaacgacttggataaaagcactgggcggtatcgagatgaagtgagtctcaagactgccatcatgtccttcattaatgcagtgctcagccaaggtgcaggagtggagagtttggactttagacttcatcttcgctatgaatttctgatgttaggaattcaacctgtaatagataaattaagggaacacgaaaattcaacattagataggcatttagacttttttgaaatgctccgaaatgaagatgaactagaatttgccaaaagatttgaactggttcacatagacacaaaaagtgcaactcagatgtttgagctgaccaggaagaggctgacacatagtgaagcttacccgcatttcatgtccatcctgcaccactgcctccaaatgccttacaagaggagtggcaacactgttcagtactggctactactagatagaattatacagcagatagttatccagaatgacaaaggacaggaccctgactccacacctttggaaaactttaatattaagaatgtcgtacgaatgttggttaatgaaaatgaagttaagcagtggaaagaacaagcggaaaaaatgagaaaagagcacaatgagctacaacagaaactggaaaagaaagaacgagaatgtgatgctaagactcaagagaaggaagagatgatgcagaccttaaataaaatgaaagagaaacttgaaaaggagactactgagcataagcaagtcaagcagcaggtggcggacctcacagcacagctccatgagctcagcaggagggccgtctgtgcttcaatcccaggtggaccctcgcctggagcaccaggagggccctttccttcctctgtgcctggatctctccttcctcccccaccacccccacctctaccaggtgggatgcttccccctccaccgcctcccctccctccaggtggccctcctcctcccccagggcctcctcccttaggggcaatcatgccacctcctggtgctccaatgggcctagcactgaagaagaaaagcattcctcagcccacaaatgccctgaaatccttcaactggtctaaactgcccgagaacaaactggaaggaacagtatggaccgaaattgatgatacaaaagtcttcaaaattctagatcttgaagacctggaaagaaccttctctgcctatcaaagacagcaggatttctttgtgaacagtaactccaagcagaaagaagcagatgccattgatgacactctgagttccaaacttaaagttaaagagctttcggtgattgatggtcggagagctcagaattgcaacatccttctatcgaggttgaaattatccaatgacgaaatcaaacgggcaattctaacaatggacgaacaggaagatctgcccaaggacatgttggaacagctcttgaaatttgttcctgaaaaaagtgacattgacctattggaggaacataaacacgaactggatcggatggccaaggctgataggttcctttttgagatgagccgaattaatcactatcagcaaaggttgcaatcgctgtacttcaaaaagaagtttgcagagcgtgtggcagaagtgaaacctaaagtggaagcaattcgttctggctcagaagaggtgtttaggagtggtgccctcaagcagttgctggaggtggttttggcatttggaaattatatgaataaaggtcaaagagggaatgcatatggattcaagatatctagcctaaacaaaattgctgacacaaaatccagcatcgacaaaaacattacccttttgcactatctcatcactattgtggaaaataagtaccccagtgttctcaatctaaatgaagaattgcgagatattcctcaagctgcgaaagtaaacatgactgagctggacaaagaaataagtaccttgagaagtggcttgaaagcagtagagacagagctggaatatcagaagtctcagcccccacagcccggagataagtttgtgtctgttgtcagccagttcatcacagtagccagcttcagcttctctgatgttgaagaccttctagcagaagctaaagacctgtttactaaagcagtgaagcactttggggaagaggctggcaaaatacaaccagatgagttctttggcatttttgatcaatttcttcaagctgtgtcagaagccaaacaagaaaacgaaaatatgagaaagaaaaaggaggaagaagaacgtcgagctcgcatggaagctcagctcaaagaacaacgtgaaagggaacgtaaaatgagaaaagctaaagagaatagtgaagaaagcggagagtttgatgaccttgtttcagctttacgctcaggagaagtgtttgacaaagacctttctaaattgaaacggaatcgcaaacgtattaccaaccagatgactgacagcagcagagagagaccaatcacaaaacttaatttctaattttccatgaatacttttttttagaaagctcattagcagccctctaaagtgactagaacgtttcattacactgccttgcaatccaaacagtggcaattttttccttcatctgtgagtgaatgtgtgaacgtgtgtatgtaaatgtatgtgtgtatatattaaaaaatgtatatagatgtctgagtgttgtctggagacctatacgtatggttaaaaagatttatgttaatgtatgtgctccaaaacctttcgtgtatgcattcacattgagtgtggctcattttctttccccgaacgccatgactgttcagaagcacaatactatctcctgaaagagataagagacattccctagattcaaaggcaaaacagaagaaacaaacaaacaaacaaacaaagcttgcaaaatattttatggtttccaagcttgatatcctttaaaattattttcattgatggaactggagttgttggaaaaacatagatttaaaatgatttttgatagctgacattgtgatgttgatgtatcacatcagtaataggaccagctttgaatttctgacattggtgtggggatacagtctgtaaatgtttattgagaacatcttgcacacaatttgaattatgtagaatgtcaatcaagtttttgtatatttaaaagttggacatcaattttttcccctgatttcatcaagttatctctgccaagtgctcttgataatttcttcagatttttggaaaaaaacactatataaatgcaatccatgcttttttaaagaacaacattgccagagtatgcttgttctaacaatatagatatataaaccttaaaaataataaaatatctcacccaagacttaaaggaagaattctctgaagggataaagattact

SEQ ID NO: 84 - DNA, 1626 bp, Homo sapiens
gaattccggtgaagttgaccgggtccacccgaagcttgtgcgcgtgcaggtcgctcagggcggacgcggcacggagacggcggcagcctggactaggtggcaggccctgcatcatggaaactctttctaatgcaagtggtacttttgccatacgccttttaaagatactgtgtcaagataacccttcgcacaacgtgttctgttctcctgtgagcatctcctctgccctggccatggttctcctaggggcaaagggaaacaccgcaacccagatggcccaggcactgtctttaaacacagaggaagacattcatcgggctttccagtcgcttctcactgaagtgaacaaggctggcacacagtacctgctgagaacggccaacaggctctttggagagaaaacttgtcagttcctctcaacgtttaaggaatcctgtcttcaattctaccatgctgagctgaaggagctttcctttatcagagctgcagaagagtccaggaaacacatcaacacctgggtctcaaaaaagaccgaaggtaaaattgaagagttgttgccgggtagctcaattgatgcagaaaccaggctggttcttgtcaatgccatctacttcaaaggaaagtggaatgaaccgtttgacgaaacatacacaagggaaatgccctttaaaataaaccaggaggagcaaaggccagtgcagatgatgtatcaggaggccacgtttaagctcgcccacgtgggcgaggtgcgcgcgcagctgctggagctgccctacgccaggaaggagctgagcctgctggtgctgctgcctgacgacggcgtggagctcagcacggtggaaaaaagtctcacttttgagaaactcacagcctggaccaagccagactgtatgaagagtactgaggttgaagttctccttccaaaatttaaactacaagaggattatgacatggaatctgtgcttcggcatttgggaattgttgatgccttccaacagggcaaggctgacttgtcggcaatgtcagcggagagagacctgtgtctgtccaagttcgtgcacaagagttttgtggaggtgaatgaagaaggcaccgaggcagcggcagcgtcgagctgctttgtagttgcagagtgctgcatggaatctggccccaggttctgtgctgaccaccctttccttttcttcatcaggcacaacagagccaacagcattctgttctgtggcaggttctcatcgccataaagggtgcacttaccgtgcactcggccatttccctcttcctgtgtccccagatccccactacagctccaagaggatgggcctagaaagccaagtgcaaagatgagggcagattccttacctgtctgccctcatgatttgccagcatgaattcatgatgctccacactcgcttatgctacttaatcagaatcttgagaaaatagaccataatgattccctgttgtattaaaattgccatcccccgaattcccataggatggcaagcaaagttcttctagaattccacatgcaattcactctggcgaccctgtgctttcctgacactgcgaatacattccttaacccgctgcctcagtggtaataaatggtgctagccggaattc

SEQ ID NO: 85 - DNA, 44147 bp, Homo sapiens
  misc_feature (18225)..(18227): n is a, c, g, or t
ctcccagagtgttgggattactggcatgagccactgcgcccagccgaggaacacttttcaatccttacccagttattgtgaacgttcataccttttcttgaagaaataccgtttttgttgttgttgttgtttttgagacgtagtttcgctcttgttgcccagactggagtgcaatggcatgatcttggctcaccgcaacctctgcctcccgggttcaagcgattctcctgcctcagccttccgagtagctgggattacaggcatgcgtcaccgtgcccagctaatttttgtatttttagtagagacggtgtttctccatgttggtcaggctggtctcgaactcccgacctcaggtgatccacccgcctcggcctcccagtgttgggattacaggcgtgagccaccgcgcctggcccttttttttttttgtaacgcggcagctccaaaccccgctgagagtatatgcatgggaaaactttctgaaatcaaaaatattccgaattctggcaacatactgggccccaagtctttcggatttaactctgcctcggccgttttattcagttaaggaaactgagtcactccatcccaaagccagattcccgcggttctaagctgaagctgtctcgggtgcatttgcattccaaaaaggcgaagggtcccgctattactgctcctggtacctggagctgccaagcacccctgcgatggggcgccccgggggctgtgcgccaggctgggagtatccttggggggcggggcgagggggcttccggggcggcagcacctggcccggctccggccccgcccgcgtcagctctgcgcggtgattcactccctccttcgccccggggcccccttcccggccagacggcgggcaagacagctgggtgtacagcgtcctcgaaaccacgagcaagtgagcagatcctccgaggcaccagggactccagcccatgccatggcggattctgagcgcctctcggctcctggctgctgggccgcctgcaccaacttctcgcgcactcgaaagggaatcctcctgtttgctgagattgtgagcgttctggggcaggcgcgtgggcaaaagcgggatggggtggctggaccatgcggaactggatggtccgggtgaggcaggcacttggccggggcgctcggcagtggggtgcaggtgggtgggttcacggtggaggcccgaaacccggggcgcagggcgagtcggtggggtttgacgaaggttgttgagatctggtggtccccggggtgaagcaaggagcctataacgcatacggagggctacgtggggacagcctgcgtgaactcatcagtggacgcatcgaaggggtcccagggtgctgggaagtgggggcctcctgtggcagggcgtggcgcggcctgggcacaggagggcgggctggcagcgcgcccaggggcagggcctgttggggtggggcccccccgccccgcgctagtcccgcggtgtagagcgccccgcccttcgccagttcttcctcgcccttcagaggccgggcgggatgtccttagcttttcggggtttccacccttctcaaagtgggcgccgcctttgagtcacttgtaaaaggggtgcggcgcctttaacggagtcctgcctctctggtgtcactctcaccgcttcccaaaggggttgctgggggaaccgcgtgttccgccccggtcaaggccacaaagctggcgtcagcggggctcacaaaacacctggcagcgccactcccctcaggctgcccgtaacctagaagggaaaagaggaaactgaggcacccaactctactccttacttgttgggtgaccctggccaagccattaaacctctctgtgcctcagttttctcgtctataaattagaaagagtaataatagtacccagagcattagattgtcgtgatgattgaatttggaacacagtgagcacataaaaagtgtttagctattattgtatgtcatttccccagccctcgtaggcatcttagtatgggacccccaatttaaaccaatcttctcagccctggttgctgattgaggtcccctttcccatgtcacccttccagatattatgcctggtgatcctgatctgcttcagtgcctccacaccaggctactcctccctgtcggtgattgagatgatccttgctgctattttctttgttgtctacatgtgtgacctgcacaccaagataccattcatcaactggccctggagtgtgagaaggggtccacaatggcaagaccagggaggggtctgggcagttaggattgtcggggaactgtggttgctgacttccctcttctcctccctacacctcacaggatttcttccgaaccctcatagcggcaatcctctacctgatcacctccattgttgtccttgttgagagaggaaaccactccaaaatcgtcgcaggggtaaaggccatgggagcagtctgaagcacagagcgaagggtttgaggagccagggaccatttctgcctttgcttctggcagaaatcgtgtgacccacagcaagtcacacttgtcctcagacatggaggaaagtctggcccaggacttggttttgcctcccaaggtcttcatttgctgtgaagggaagtcccttgtcagacacaaggaccttggtgagaggtacaaacaggcggcccctttgtcaacgcactagactaccatctgcaagaactttgtcccaaatgtagtagaaattggggccgggcgcagtggctcatgcctgtattcccagcactttgggaggctgaggccgaggcaggcagatcacttgaggtcaggagttcaagaccagcctggccaacatggcgaaaccccatctccactaaaaatacaaaaatcagccgggcatggtggtgggcgcctatagtcccagctactcaggaggctgaggcaggagaatcacttgaacccagaagacaaaggttgcagtgagccaagatcatgccactcactccagccccagtgacagatgggtgacagagtgatactgtgtctcaaaaaaaaaaaaagtatgacttgaattgtgccccctacgggtagggccacagtgtggcctccctgtgttgagaggtataggaggagggagagtggggtaggatgcactctcttggcctttccctggcttaccaacccggtgcttgagtcccatcctgcgtggggcaggtgctggaggtggtggatacaagaagataagagactgagtaacctgaccagctaatctaaaccccctcactcctatcctgtcccccaggtactgggcctaatcgctacgtgcctctttggctatgatgcctatgtcaccttccccgttcggcagccaagacatacagcagcccccactggtaagtgtgtgtgtgtgtgttggttgggggtaagggggttgctgagagggcagagggaaaaaggaaagggatctcttaaaggcacgaatgccaactctggtctcgtattggtacttagggcttttgtaccaataggtaccataagcttcggtattcttgtgtgtaaaatgttcatggactttggatcttgttttaaaaaatgggcatatagattcagccaatgctttctctcttttcctcacctgcagaccccgcagatggcccggtgtaggcgaacttccctcatttctctctgcaatctgcaaataactcctccattgaaataactcctccccaccccaacaacaacattcccagcagaccaactcccaccccctctttgaggtaaaagtgcctttattgggagacttttgtcttccagcctgccaatcaaccctcctgggtgtggccaccatatgtgtgtgcctaggtcctccttctgcacgatccaataggagacaccagttctgactgaaccatgcccccacctaagtcacaaaatgagggaagtggggagttagatttcagagtccaggccctaggttgggacccactccaaataatctcctcggtgtgggtggtggttctatagagggataaatgaataataaacattgttaaaatatacgataatgaataaagtaatcctttcatcaaatgtgggtaaatttcaagcatcaggagggggaaatggagtggaaacagctggggcaaggaggcaaagaagccaggcctgttttacaacaaatattaaattacttcaataatacaaacgagaggcccggtgcggtggctcatgcctgtaatcccagtcctttgggaggctgcgggaggattgcttgagcccaggagttctagaccagcctgggcaacatggcaaaaccccatctctaccaaaaaattaaaaaattagctgggaacgctgacacgagcctggagtcccagctacttgggaggctgaggtgggaggatagcttgagcccaaaacttttgaggctgcagtgagccctgatcacaccactgcactccagcctgggcaatagggtagaccaagtctctaaaacagaaacaaaaatagaaacaaactgataaaggagggaggaagaggatttatgacttaggttgtaggggcggggcgtgggggtgaggggcatgggcctcatcatctactctgactggagaatggagccccctccaggacggcctgccttcaagccacgatgcagttcttgtctcgggcctgacgaggcatccctgcgcgagagtccctggggagcgataaagatggggagttgaaggtctccattgcagtgtcctgagcaggcatgggcctgcacaaatgcgggggcagagggatgcgctctcctaggaagaagccatcatcctctgatgattcggaactggaactggagggcgagctggagcaagattccgagtctgaccctgatcccgcgtcacattgatagtggcgacgtctgcttgggtggcggttgtgatggtgatggtgattatgatgatggtggcggcgacggctgggggccctgggtgggggactgcgtggcctgcggcgctgggccgggggtgcactcagggtccggcgcgggcctccttcagacaccagagggtcgcggaagctgacgcgtggggtgctctgacgaccgaaggcactatcatctgggcgcaggttaggctggccgggggactctgggggcggctcggggacactgcggagccccagttccggcatggagtggcggtggggagcccctctcagaaagcgggagggctcctcagggcctgtagctgttaagggggagacagagtgactccttgtatctgccctcccactggccccctcctaagaggaggcctgcggaagggccttctttcctccactaagactgggaaagtgggggcaggggtcggagaatggcagggaggtgggaagtctgggaagtgtgaggcctggagcaggctctgggtgttgagagggttggaaggaagaacacggagcaagatgggactggtgtggggggcgtggccagggcacccggggtggcttcggatggaagaggtgtggcataggctggagtagatttggtttgcaataaaaggggtggggcctgactgcagaggatgaagggtgaccggctggagaagaggaagaggaacttggggtcaagcagagacaagttgaggtaggggaccagccctgtattgacagggtggaaccagggttcatgaggcgggtgtagtttgggatggaaaccaggcctggactggtgtggggaaggaggatgagctgagaaatgggcggggcccagggatacagcaggtgaagggcctgggctagtcaagaaggaagggccagggctgaggcaggggcaaggacataggggtgactgggctgtggctgggtgtggctagagggttagctcacctggcgctaactctgtgctggtgcctttggtggtggtctctgatgcccccttcacagcagagaaagaggctgtggaggctgcaagtggggctgtgacagggccggcactccagctgcggcggctcggccctggagctgtgggctcggacccaaggctgcaggctcgagagcagaagattaggcctcggcgtggcaggaatgggcggcccagcagggcccgcccacagcgactacagcagaagcagcggtctgaggcatgccagtgctggccctcgtaagccatctggccttggtccaggcctgtggggaacgacgagggggaaaaactgaggcagaacccccaggcgtaaccccacccctcgtgaacgagtcccttctcaagaagaggtggggaatccgaggcagggcacccctgggtgccttcctccctcctccagaatggggcccttttggagaaagcaggaaacaggttttggttctctcctggagactggctggtgaacctctctctcactcctccctttctttcccagggtgctctctcccagagcggggtgggcattggactctaagattcgggccaggcttagacattagggggtggctccaagtggaaggagaatggaaagctgggcctgaagaggaggcctggctggtgggggcagggcttagcaggtggggagtggccctgttgagaaaggagtggttctcagaggatagggtgtagctagaagctaggcctgacttaggctgatacaggagagtggaggagaacggggcacagcttggggtggtaaaggctaggagtagggcgagccctggggctggaattagagcaccctctggaggtgggtgtagacatgtggtggtggcctagcattgtgttaggtggggtttagaaagcatggcatagtggggacattgggagtgggacttgcaaccaagcgtacaggtctatagtgttggggctggacaaagtacagggcacaatggaggatggggcctggaggacaggaggagtcctggtggggtaggactgtggcccagctgtccatccatccctctgtccagtcccacagcattcacccaccgatgtgctccccacagccatcacagtactccgcgtggcgggcctcgtagcaggcgcagcagtgggggcggctctgacgcatgacatagcgctgccctcctagtgaagcttcacactcaaagcagcagaagtgatccatgtgccagtggcggccctcagcctccgtgcactcaggggagaagatgatctggagggcgcaggccatctgtggctgtcagatgagcctgctcctggccctgcccaccctcaactcccacccctgggcagggaggcccaaacctcgtcacaggcttggcagcgtggacgcaggcattcggcatggtgacgcccgcagtagaccttgccaacatggtagaagtagatgaggtcaaccagcagttcctggcacgtggtacacacgaagcactgtgggtgccagcaggcacccaggcctgcacggctggcaaacactgcgatgtccccacctccaatctgctttccgcactgccatgagacaagcaccaagatggttaccatcactgtcaccaagatggtcagatggatggggtcagccaaagtatgttacacttgggcctttcccacagtgaaactttgtgatcagccccacccatggggtaactttgacacaggccctgcctataccagggatggggttgggcggtaccttagagactgaccctgctcatgagggaagccgtagagacaggccctacccatggtgggtggccttataggcaagcctccctcatcaggggtggggaagacagacaggccaggcctagtgggggaaaccacagagatagtctccacccaccgggaccttagcaatagatctcacctaacagtaggatctaaggacaggccctgcttaccactgggccctgcagacaggccctgccactgtgggtcagctcttgaggacaagttctgaccacaggaggaccaaagagatagcccatgccccatgtccactgcacagacggggagaaaaacacactaaggcctccttacagacaaaccccacacgacagtgggattgatgggacaggtccctgtccaccaggggttgccttagagacagtccctgcccaacagtgagatgtgaggaacagaccccgcccacaagaggggaccctagagacacctcactggggcttaagtggcaggcctcatcttcccagtgcttggaagatgtgtcctgctccccagggcttggagcagaggcactgctcactcgctgaggccctccacggctcacctcctcacaagatgccccagtgatggtcaccgggaagatgcgcacgatgccacgccccagattctcccgcttccgctgctggctaaaggctcggagctctttcttttcctcctcttccagtgctgtgcagtactgtgcctgggaggagaaggcatctcccaggctcctcccttgatgcctgtccctgcccctcttccagacttcatccatgccccgcaagtttacttctaggtctttctatagatggtgcctcctgcctgaagtaaccacctcttcttccaaggcccagctgtggttttgccaaggaatgtcccctgatgacccctgcctgtctggaccactcacctcagatcagctcacctttcctcctctgaccctgccctgcattggcccaggctgtgtgctgtgcctggcatgcccttcctgtcttctctctcctcacctcactgtcgtgtgggggcagctggtgcagcagctgcttgatcctgtatttctccccaggactgttgacgtaggggaccttgtcctctgggaggcagctgaaaaattgatatacctgggaggacataggagtgggagaaaacaactgaaatgagaggtgagttgggatgcagtgagatggcgggtccccatttctcagaaaatgaaaggcattaggagggaccttctgactccctcatctctccttcctaaaggcggatcatttccctcagctcccagctcccaaacacgctgagggtcctgcatgtattgacctcacttcctcctccagctgctgatcacctttttttttttttttttttttttgagacggaatctttctctgttgcccaagctggagtggcgcgatctaggctcactgcaacctccgcctcctgggttcaagcgattctcctgcctcagcctcctgagtagctgggattacaggcataccactatgcccagctaattttttatttttagtagagacagggtttcaccatgttggccaggctggtctcgaactcctgacctcaagtgatccgcctgccttggtctcccaaagtgctgggattacaggtgtgagccaccgcgcccagtctactgatccacttttctttttccctttacaggaaaattcctcaaaaagttatgagcacttgtgttcactccacttcctgtccttccaatctctcttgagcctacttgaggcaggcttccgctcccatccctcttccaaagctgtcaaggtcatcgatgacttccccattgttaaaatcattgttcaggtctcagtcgtcatcagacttgatgatggtagcactgcaccgagctgaccactctctcttcctggaaacactttcttcccttggcttccaggacaccacacagtccaggttttccttccaccttattggctgctccttctttgtccctgttttggctcctcctcaactagctgacccctaaatgcaggaggatcctaggactcagctcttggtcctcttgcctctgtctacattcaatttcttgggaattacattcaaccttatggctgtaaatatcatctacttggctggctaatgtgtcacctccagcctgtgacacataatgacaaaacacatacgtccagctctgtaacttatcccttgagttccaggcaatgtggctatttagatgtctaacaggcatctcaaactccagatggccacaaccaaacttatgctcttacccctcaaactgctcctgtcttggcctctcccacatcagttaatctacctatcctcagggtcatctttcactcctctttctcccacccccacaagcaaatcctctgagtgctacttccaaaatataggctgggtgctgtggatcacacctgtaatcccagcactttaggaggcccagaggggaagatagcttgagcccaggagtccaagaccaccctgggcaacatggcaaaaccccatctctacaaaaaatacaaaaatcatccaggcgtgatgatgcgtgcctgtagtcccagctacttgggaggctgaggtgggaggatcacttgagctcaggaagttgaggctgcagtgagctgtgattgagccactgcactcaaacctgggagacagagtgagacccccccccatatatatatatgtgtgtgtgtatatatatatatatatatacacgtataattattatacgtatattatttacgtaaattatatacgtaaaataattattttatatatatgtatatagatgtatacatatgtgtatatatatgtgtatatatacgtatatatgtgtatatatatacgtatatgtgtatatatatacacgtatatgtacgtgtatatatatacgtatatatatatacgtatatgtacgtgtatatatatacgtatatatatacgcgtatatatatacgtatatatacgcgtgtatatatatacgtatatatatacgcgtgtatatatatacgtatatatatacgtgtatatatatatacacacacatatatatatatattaaataattatttattaaacggaattttgctcttgttgcccaggctgcagtgcaatggcatgatctgggctcaccgaaacctccgcctcccgggttcaagcgcttctcctgcttcagccttccaagtagctgggattacaggcatgtgccaccacgcctggctaatttttttgtatttttaatagagacggggtttctccatgttggtcaggctggtctcaaactcccgacctcaggcgatctgcctgcctaggcttcccaaagtggtgggattacaggcgtgaaccactgcacccagcctattttttttttttttgagacagggtcttgctctgtcgcccaggctggagtgcagtggtgcaatctcagctcactgcaacctctgcctcctgggttcaaggaattcttgtggctcagcctcccgagtagctgggattacagacatttgccaccatgccagactaatttttgtatttttagtagagatggggtttcactatgttggccaggctggtctcaaactcctgacctcaagtgatccactcgcctcggcctcccaaagtgctgggattacaggtgtgagccaccatgccggcctttctgtctgtctgtctgtctctctctccatatatatataactccttgcactgccagtgccatcatcatcaggttcctcactggtctcctgattccacccttattcctccaggctgtcttctgctgacaaccctcttgcgacttcccttcattcacaggcaaagccaaagtcctctccatagcccctgccacatctctgacctcatctccagctggtctcccccttgctcactctgcgccagcagcactggccttgccatcccttacatatgccaagcacacgcctgcctcagggccttggcattagccatgccctttgcctgtgtgaatcgctgtaaccttagatgtctgcatggctcacttctcacctcctttcgggcagctcaaccattaaattctcacagaggcttattctgggcaccctatttacaattctagcatctctctccttccctctctctttcttcaccccaccttccttgctttttaattccatagcccttacaccatctgacatatatttacaggtttgcttattgggtgttcctcctttccagaatctaccctctgcctgggcagattttttttttttttttttgagaagtatcactctgttgcccaggctggagtgcagtggcacgatctcagctcactgcaacctccgcttcctgggttcaaacaattctcctgcctcagcctcctgagtagctaggattacaggtgtgcaccaccacacctggctaatttttgtacttttagtagagacggggttttgccatgttggccaggttggtctcaaactcctgacctcaagtaatccgcccgcctcagcctcccgaagtgctgggattacaggcgtgagccaccgtgcccgtgggcagatatgttattttgtgttttgctcattgctgtgtcctcagtgcctagaacagtgtctcacatgcagtaggtgccccataactatgtgttgaatgagtcaatcaatgaagtcatgtggtgaatgaagtgctgggagggtagaatagggagtggggccacgcatggtggcttgctcttgtaatcccagcactttgggaggccgaggcaggatcacttgagcccaggagttcaacatcagcctgggcaacatagggagaccctgtctctacaaaaaaattttaaaaatagccaggcagggtggcatgcacctgcagtcccagctacaagggaggctgtggtgggcaacagagtgagaccctgtctcaaaaacaatcaatcaaaaataataggattggggtgaacaggccctgaggaactggtccctcagtcacccaaggtatggggggctgaccactcttccatcacagaggggccagaagaccctcggtctgactgcacactctagcgtagcccagaaataggttcccacctgagtgtgtgtgtgtgtgtgagcattagtgtgcacccactggacagcaagagtggagggctggcctctggtcacctgctccggcttaaggcctgggggcacccaggcatactcctccgatgcacagcctgagtcgtcgtcggagatggagtggcgctggaagtccgagattagccgacacatgatgcgttccaggtccacaggcaccgcgtgcactgcatgctcctcccgcgggcatttgcaatgctggcagatctttctgagggggccgggatgggggtcaattactaaggagttgcccacccgaacccctcggcagcccaggtccaatggaggagcggggacatacagattatcaccaccaaaggtctgtgagcagggacagggatctgggcctgggggcggggctgcaggaggtgggcctatgagccagggtgtggctgggctgtgagccagaggacaggtcgtggggagtgggatgctttgtgggggaactttcactagacacaggcatctaacctgtggtgaggctctgaacttgtgggctctgagcctgtgggtagggcctgagtctgggggctgtaggctctgtttattgggtgcagggctccagcaggaggataggacgctgggcctgggagagtaggtctgagtctaagaggggtgctggaggccagagggcggcgctcaaagttagagacgaagaatctccctagggatgcgactccgcggctacgggagaacacttctgggggcggggctgcgtagtgggtggagctctcctgggaaaggactttggggaatgagtcagggggcggggctctgaatctgagcctgaggctcttttcccaactgagatccctctgtaggcggagctcaagcgtaggggcgtggcgtaaggctcctggatttccccccgaaggcggagctctgacaaaggcgaggccctttaggggcgccacttacctccagccgtggagcaggaagccagggcactgctccctacaggagttgcagggctggccccggtctgggtcctctgcctctggaggctgcagtgggcgggggcagatgcagggccgggtgaggcgcggaagcagggaaggagaagtcaacgcccgcccctccacttcattgcccgcgaccgcacgctggggcctgtcttacctgggcagcgctgggcaggctgggacagcgcccagagtgcgggggagcgggacacaaccgaggcagaggcggggcagttggagccacctccttatatgtccccttttcagggaattccccttcctaggctggcctcggacccccctccccgtccgcccctagcctcagacacctcccaccagccttagatccttccagggctcaagcacctcccctataattcattgtactctccccactagagcacagaacccctactctgggcatcctctccccggcctcatcccggttccctctccatctacgccgccagcagcactccagttccacagggtaggagacgagaccgcattcttccttgagatccccacgtgaaccctgcccctctcttcagaagctcaggagctcctcccctaaaccctggcctcatgccctgatacccaaggaactggggaccctccccaggatctcaggaggcccctgctccattcagaaacccccatcccaagaaaccttggcctttacccatcccatcctagggctatttattccttctccggaccatcaaacccagaccccacattcccaggtcagagacccactccaaaggaagtgaaagaacctcctgtctaagaagtcaaaaactcccttgctcaggcggaaccctggaagccttgtccccccaaatcccagtctcttgactctcagcatttcggcatcccaggagtgtaggactccatccctccgtgcacattcctccaaggtactgtgtcctttagaagctgaggaggtcggccaggctcggtggctcacgcctataatcccagcactttgggaggccgaggtgggcggatcacctgaggtcaggagttcgagaccagcctggccaacatggtgaaaccttgtctctactaaaaatacaaaaattaggcgggcgcggtggcgggcgtctgtaatcccaggtacatgggaggctgaagcaggagaatcgcttgaacccaggaggcggaggttgcagtgaacggagatagcgccactgcactccagcctgggtgacagagattcagtctcaaaaaaaaaaaaaaaaaaaaaaagcagcagctcaggaggttcctgctcaacctaaggcttcaagacccagttctctggccctcaggattccctcccacaattcataagagaggggtccccaccaggtcccaggagtgctgatgaaagtgtgtggagaggtgattagggggtttgggccaccagatctacaccttcctccatccattcgcctccagcagccccagccccaggtctgggaatgcaggggatgggattcccagatcctctgtggggcacctattcgctatgcctatccattgcccccttgcctgggcctcagtttacccccgacccccaccgctgccctgactcccgctcaccgcacgcccggagcggcgcctccgggacccacgcgcgaacatggcgcgcccgggcagggtcaagccgggccgggtcaggcgaatgtaatccttgcgaccgtcaggccaccgcgcgtccggcctgggaactcggttccgtaaacctgacaccctcgtgggaggagcgcgccccgcaggcccgcccccgggcatgtggtctctccgctgccagggcgccccctgcctagaggtgaactgcacgtagcccggagtgccccgcgggaaaggcctctgccctcccgctccgggccggtgcggggcgtcacaaggcacgacccccagaatcccggcgtgccacgtggcctctcacgggacctggggcttgaaggttctgtagtggaggatggggagactcagaggtggccaactggactagaggggtggcgcgctagggtgcttgtgttgacgttttgtgtcgatttatttcggatgcttatttgggagaggggttaaagacacctcttggctcctccccactggtgaggttccgagggtctccccgatgaatgctgcaacaatgggccccaacctcacccgcagccccagctggtgctcgctgggaacctgggaacctggccctagccaccagagagctagatcttatacgcactcctcccttctcattcccctctcagcgaggccaggttccaaagccctcgtcccctctctcccctcatccttataagcctagctgtccagccccgtccccccaccccaagtcttgagaagtagatcttaaagccttccctcccccacccacatttttctctctccagttatccccttccccagctcagttccagggcggggagcctctccttcacgctctcaggcttggctgtgcctccgggctggggggagggggtcccatggcctcagtcagaactcggcccgggtctctatgcacggagactgcagcggccaggcccttcatcgcgggccccggggacctctccccgccccccattacacatgtccctgtcacttcccgtggagtggagaggtaaaagagaataactaatgaactaaggagtcaccccggcgccccacctcccctccttgcctaacctgtctcccatttctccagcctgggcggaggcagggaaaggagagacagtagggtctgaagattagggatggggtcaggcaatgtgaggtttcctcctattcggaccccttggggatttgaggagagggttccacaggggctcggaagaggcttggctaagggaccagaattagaaccaactcctagaaagaccgggcatttggtggccagtagtgggagggtgagcagggctactcagagagtgacagagtgattggcaggagaggcttcccagaggatgctgctctgcctaacacttttgaaggggcctgaaatggtgcagcaagctgaactgcggtcggtgggtccgggtggagcttgttctcaccacctctccctcctttctcccccggccaacctcctccccggcgcccgaaaaagacacactgagaaatcagagccgggtagactaggtggttaaggagtttatttgggagaggagaatcatatttgttcttccttggggaggggggttctttgaacaataccgaagggtttgggaaagggtaggggtctggaggggagaaggaggggccacagccagacaaaatggcaacacacgatcacaggcactactgacatcacagacatagcagagggtgcaggataggggctccagaccaggcctccaaccaccccaggacgggtggaggtgtggagggagggagggcgcaggggaagggggaagaggggtgggccagtcccacagacccgttggttctgtcctcctattaacctagctgtttcatcacgggagtggggaagggtgtgtgtggtggggtgcttctctctggatcccacgcctcaccctacaagccatatcactcgactcttctcaggccacttccgtcccaagtcgtagccagagccattctcccccacccctaacaaaacccatctggaagctcctatccaagtcccctctccactgcccaaacccagccattgtaaaacattttcttcactgcaccatggggaggggctgccctttctgaaaccaccatggaagccccattctaagccccaccctgtctggaaccctggcttggcccattcctgaatcccacttcttgccttgctcaagatctgtcccctttagaatcaagctcagtctcccaaatgttccaagccacaccctttccataggctctggtaccaatccaagacccacctactctggagcccaccattctgcctcgcttaaagcctcgccccttctagaaccctgccctcagcgcccttccaagccccaccccagaatgctctagcgcactcctctccttcagactccagatccactctgtctggaacccaacccccctgctgacccctccactccacacctcctctccaagaccaccttgggtcctaaactgtcctctctaccccaagcccccccaatctctgcctttctttaaccctggagttggatttccctaacggcctttgttcaggcaggcattgctggaggaaccaaggccagagttgggaggagtggagggagagagaggagagagtctgaagtcacgcccaccctccccacacagccgaggtctgttccctccctgtcctccttttagatccccttaacctcaggggacagggagggtaaacagagaggggccaagggatgcagggaaagggacggggtaagagagggggcccactcaagactgggcacctagtggatgaggggagtggagtgagggcagggctcagacagataaatagatatttatatataatatatatatatatnnncaccccagacagggtctcctggcttgaggggtggagacctagggtataggggtgggaaggggggcagccttcctcctgagctcttgccccccccaggtcctcctgggcttcactgacctgtagagacacaagacacagaaaggagagggggtctgacatgggtggcgccctcagatagggggtgggctgttatgcctttgtcctggctttatgtcttttcttctttcctggagccagcttcatcccagctgcctctgctgagaagatatacctgaccttgcccccactgggttaggtaccaaagagattacagtctccttcctccaacccaaaaaatagtcccttaacaggtactgttctagccatttgtgataaactatattgagcaaaacaaagatccctgtctttgtggagcttatactgaaagcagagatagacttcacacagcgaacatgatgcatgagtggattatctcgtataacatagggtgacaataataagtgaaatggaaaaaataaagtgagctgggcatggtcgctcacacttatagtctcagctacttgggaggctgaggtgggaggatcacctgagcccaggagttcaagtctagcattcctaaagtgctaggattacaggcgtgagctaccacgcccagcctgcgacagggcagagttctgacacaggaggactgtggcctaatttaggatttaacagaatccctccagatgctgtgagtagaacagaatggaaatggagacctgagaagaggtctgggagagatgacagtggaagatgaaggatatattttttgaaggtaggacccacaggattttttgatgaattagatgtgggatgccctttccatcctggctaacccagtgtcagaagctacctccatccaagtattgccaccttcttgccttcccccactttttagccaccccttagccttttcctcctgcctttcctcccctatatcctccctcctatctgagggaaatctcacttctctttttctttttttttttgttttgagacagagtctcgctctgttgcgcaggctggagtgcagtggcgcaatctcgactcactggaacctccgcctcccagattcaagcgattctcctgcctcagcctccagagtagctggaactacagacgtgcgccaccatgcccggctaatttttatatgtttagtagagacggggtttcaccgtgttggccaggctagtctcgaactcctgacctcaggtgatctgcccaccttggtctcccaaagtgctgggattacaggcatgagccacctcacctggcctcttttctttctttctttctttcttttcttcctttctttctttccatttttttttttttttgagacaaggtctcgctctgttgcccaggctggagtgcagtggcaggatcatagctcacggcagcctcaacctcctgggcttaagtgatcctcccacttcagcctcctgagtagatgggtccacagatgcatgccaccacgcccggctaatttttgtattttttgtagaggtgggatttcatcatgttgcccaggctggtctcgaactcttgggctcaagcggcccgcccgcctcggtctcccaaagtgctgagattacaggcatgagccaccaagccccgaccctcacttctcttttaaggcccagcaagaaggccggcaaacctttccagaaccccaccctatccctcttcctcctttgaaattccacactacttccctcccctccagcgttggggagaggcggcagatctatcccctcctcccggattggtgagctcgtctgaccttcaagatccacgcccatttaccctcaccatctattggccttatcacctattggcttatcagtcacttctaagacccacctcctcgtcgcttccgtggctcttgcgtccgctgattcgccactgcgcaagtcccccgatattccctccctttattggttgctctgcttctctccccctgcctttccgccgagttgcccttctacctccctcccattggctcttcattctgtccatcttgaagcaccattcttcttttctccattcattagctagtttttcagctcttagcaggtagttctgcctcttgattggctccttcaaacttcagtccttacttgccccagtaaacgccttacgtactctctacccctgactcttattggttcactgacccgctcgtctccttccttgtaccctccttggccgcaccgctcgccggtcactcaccagactacatctgattggagaaggaggtgggtgcaccctgcgggccgtagccttgctgcccatagtcgccctgaggcccgtagccactgccaccgctgccggctggttgaccatagtcaggctggtagccgccctgaggcccgtaggaatcctggggcccgtacccgccggggccctgcccgtagcctgcatcgccgtaggcgtccccgggtgccggttgtttctcgggggcgccgggaggcgcgcgcaggaacggggcggcccagcctgtctccttaaacacgaaccacaggttgccgacccagagcaccaggttcaggaagccgaacacctgcagggagacaaggctcggctgtggtaccccgcccattgccttggcggccctgcgtgcaggaatgagcatgcggggaatgaatccgtaggctccgcaaggtgggggtttctgaaacccagactctctgagtcccagtgcgagaacgtcgatgtgcagaaaaatcacctctggcggggtgggcgtgttagaagaatttggagccctggggatgctgcgatctatcagtattacatatacaattatttacatatttgcacatatacacattatatacacatttatgcatgtttaaaatgtaaatttgtaatatattcatagtaaaatgtaaggatacaaacttattaaatatagctataccactaacatgcatctaaataaatgtagataaaatatatgtataagtgcacatgtataagatatatgaaacttgcataattttttttttgagatggagtttcgctcttgttgcccaggcgggagtgcaatggcacgatctcggctcaccacaaccttcgcctcccgggttcaagcaattctcctgcctcagcctcccgagtagctgggattacaggcatgcaccaccacaccagctaattttgtatttttagtagagatggggtttctccatgttggtcaggctggtcttgaactcccgacctcaggtgatctgcccgcctcggcctcccatagtgctgggattactggcgtgagctaccgcacccggccacataaagtaattttaagacataaaacactttctgtacctttccttatatgccaagccctcttctaagagctttacatgttataagctcacttaaaattcagttttgggcaggaaatactatctccattttacagttgaggaaactgaggccctagaggctaagttacctgaagtctcacatccagcaagtgacaggaaagaaaagttgtaatcttagcatctgtaacccttgtatacgacttaccttgtgccaggcccttttctgagcactccgtattcttagttcaataaatactcaactttggagcaggacctattattagtcttcgattatgcatgctcaactgaaccttgagaggctgtgactagtttcaggtcagggagcttgcaagaggtagagctgggatttgagcgcagacagtctgactccagccagtagggggcatccaagtggggaaacatttcaagtttttccttcattttgcacatgaggaaactgaggtcccaagagggtgctgagttgcttattttacatgtctaggctgggtctgggatccaggtctcccaaacctgtcatgttccccctttggggacagtctgtggtgtcacagtggttacaattgctagctcatccttcaacgttgttgttggcacgcgttcttcagggacaccccttggatctcccctgactctcctcttattctcccactccaccactccccatgccggactgtactgttttccactctccctcctccagccagcacccagggcttaccaccgaggtgttgagtcccgaggtcacagggtctctcagctccttgcatgtgttccctgtctggcggcagacaggcatctccttgataatgttctctgggtctgtggccatcttcacatctgacagccccttggcccatgccgatgagctaactagccacatgaaggcgaacacagccgtggccagaaagtcctaaggcaggcaggggtgaggaagacagcactgtgagtggactgcttcacgctaggccctggggcctcctcggatcacaggtcccccagaagaggcctgtctctcccctgccttttcagctctcaagcccacaacactttcacctgaaggtggccctcccagcttgagcttgtgtgtgtacatgacacagaggatgtgggagtgtgattgtgatatgtggctgtgggtgttggggggaggggaactctgggatgatttccgaatctgtggaaagtaatgtgtctttctacttttgtctgcatgtgggaatttttgtcattttgtgtctaggctgagggtatgtgagtacagtggtgtaggaatcagtgtgtctgtgtggcatgatgacaggcatgactgtcacagcgaacctctgtgggcctcttcctttgatctaggctgtgtagttgtgtgagagtgggaaggttctcaggtgtgggcctgtctgggattctgcataggctgtatgtctccgtgactctatgactctgtgtcccggatgcctggtgtggattaatagcagcagcaactatatgtgtggctgttatggtggctgtttgcatgtgggcctgtctgggatttggtgtggtctgtgagcatggctgtgtccctggggttccgtgtccccatggtccctacatgcaagtggctgtggggactcaccagcatgggccctttgttattctctcggtacttgttctgcaggaagatgtaggtggccagagcccccatggagtagaggaaggcaaacacggccacggtgacaaagaattcggctgacgaggagtagtccccaactaagaagaccttggtggtgccccctcggcaggtgggtgcatcaaagtacacttggtgcagcctgcaaacagaggtgggcaggtgtggcccagcccctcagaacaccctcaaccctccagcccaatcatgggtccccccatttctgacaaggccccaggaagaggaggaaataaccattcatcgagcacctactatgtaccagtcacatttcactgattgctcaaaacatcctggtgagataggtgttattcatccctcactccaacccaagcactctggcctcttgattatttctagaacttgccaggcatcctccctccctaggatctttgtttgtactggctgttccctttgccaggaatgcttttcccctagatagcttcgggtcttactccctcatctcctttttttttttttttttttttttttgagatggagtcttgctctgtcaccaggctggagtgcggtggcacaatcccggctcactgcaacctctgcctcccgggttcaagcgattctcctgcctcagcctcctgagtagctgggattacaggcatgcgccgctacgcccagctaatttttgtacttttaatagagacggggtttcaccatgttggccaggatagtcttgatctcttgaccttgtgatctgcccgccttggcctcccagagtgctgggattacaggcgtgagccactgcgcccggcctccctcatctccttgaagctttgctcaactgtcaccttctcattgagaccttccctgatctccctacttaaaattaaattgaaacattctctcaaccagcacttcttagcctggcttccttgctccacttttctcgatagtagtggtacccatctgacgtaccaggtattttttttttttttaatcttggtttttgctgtaactacaagagggcagggctttttcctgtgttttcacctccgtttatctccaggccctggaacagtgctggcacctagcagacactcaagaaatgtttatcaaatgaaatgtacagaggcggaaacagaggctcagggaagtgcattaacttgcctaaagtcacacagctggcaagggaatgtcagagttgagatctgaaccttgttttctccctatctcatgttgacttttctcccccaccccagttcaggtccccgagagaaaaaaatgtatgcatagcagaggagaggccagcgactagataacaggaaaagacagacagaaagaaaggagggtaaagggatcttggaacagggtgtgtgtatgtgagggaagaggggaggtgtcctgggactaaggcctttcctgtggtgtgatggaggagaggtgggggttgtagagagaaaatgtctgtgggagaagttctggagcacagtctcagattggaggccaggatcctgagactgagcaaatggtgccaatgcctttgtgtagcaaaggccctgagggaagaggcttgcacttattagtcacctactaagcagtttacataaatgtctcattaatgacagcctccagcaattctctaaagaaggcattattagaccctttttacagatgaataaacagaggcttagcaaggttattacttgcccaaggttgtacagctcctaaatgatggagctaggagttgcatctgggtttgagtttctgtttctagtgggctgggtcaggagagggggtccctaagagggaatgagaggtccttgggtattagggcagtttgggagggattttgctcagggggacccagggccaagactgtttttctaggggacttgtgggctagagccttaggacccaaagttctagacatgggaggcgtggggagggggcacaggggatggttgtggtcttgtggatccccaaaggactggctctaagcagtgtcccttgctgccagctccccctccttccccagactcttttctcccttgcctttgtggacccatggatacctggctgcccctctgcctctcaggccacactttcccggcatctcctctcttttccatcattgctcagggcctgtgctaggttttcttctactttcactcttccatctccccactgggtgatcacttgagcctacatttaccctcagtactcgaagacccccagtttccaactcaacccctgtcctctttcctgagtcccttaaatttattttacttattgaacagacactgatggagcacttattgtgtgccaggcactgtgctaagcacctgatgaatattaactcattgaatgctaaccacgaccctgtgaggtagatattattagtattcctttttacagatgaggaaattgagacccagagtggttatgtgatttggccaaatagtgggggagtctcagaaacctgtgcggggattgtgtctgtgggtctctgtcatcccaccctgcaggaggtaaacatcattgtgagggtagtgcccatgccagccgtgctcattcttgtgcacctagcacccagtgtattgcccggcacacagtgtgagctcaataaatgtcagaattgtttaattgggtttaatttttccctatatctaagcagcacccctcattattctattctctaccataaaaccctacatgaggatctcctcgagtttctctcagtctgctattatcctctttgttaatttatttgttataatgtaggctccatgaaggtagggagttgggtctggtttttttttttttggagatggagtttcgctcttgttgcccaggctggagtgcaatggcgcgatttcggctcccaggttcaagtgattctcctgcttcagcctcctgagtagccgggattacaggcatgcatgaccacgcctggctaattttgtatttttagtagagacggggtttctccatgttggtcaggctggtctcgaactcctgacctcaggtgatccgcccacctcggcctctcaaagtgctgggattacaggcgtgagccactgtgcctggcgggagttgggtctgttttagttactatcatgcttccagcactttgagtagtaccagatataaaataagttctcaaaaatgtgtatagaatgaatgaatggggattaaataataatattggctaacattaattgggtacctactgggttaaggtatgtatatacacctgtcttacttttgtatcttgtttattgcctgtcccttaccccttcgctggaacagagccagagggccacagcctatgtctgccttgctcaccacatagtcctagagtccagagcagtgccaggtacaaggcaggtgctcagtgatcccagtggatgtagcctcgaggtgggagctgggcaggagctacttgcggggggaggtattggccggttccaccctgccccttcctctcccaggtctgttggtatcccagggtgggagcacacctgaaggggtactcgaactcgacctcgatgctgaggtcactctcggtcttgttggcacaatccacgctcagctggagctccccactgtagctgccgcatgtggcaaaggcgaagatggcgaagaccttgggcagcagggatggggatggccacagtgaacctgtgtgcatgtgggagggaggtgccctcctctggacagatcgggggcccagcacaggcagcagcagatggagcagtccccacccccaccccctaatcagggctcatcgggaccaaggacaagctgattacaagggtatggctgtctcttcctgtttctctctctgtgtctctctctgtctctgcctttccatgctgacctccctcttctctgtttgtctctgttgttctctgtgtatctcactgtgtctctgtttctctcggtatctctgtttctctatgtgtctttgtctttctcagatgtctctttgtctctctgtgtctctgatcctctctgcctctgcctatctgatctgtcgatgtctctttttgtctcttttttctctgtctgtgtaagtgtatgcctgtatgtctgtgtctttctgtttcttggtctgtttgtctctgtctctctgtcctgtctctcactcggtctccggatggttctctctctgtctccctcttgcctctgtgtgttggtttctcttttttctgagtgtctctttctctctgtgtctctctctccctcaccctgttttcctgcctctctccctgcgtctgtttctctttgcaatctgttttctgtgtctcctttttctttgtttctgtttgtctcttctctcttatgtctgtatctcttctcatctccatatttcttttttttttctcagtatttccatctctgtctttatcattccctgtccctcattctctctgtcaccttcactgtctctgggtttctctgactttgcatctctcacccagcatctgctacaggctccacctcccccacccctccctcacttcaagagaggaggtaggacgtcacagtctcccacttcacaacgggggtaccctcagccctatgtgacgtcacagctcatctgttttctggcttcagacccctgaaacctcaccctggagcccaattcccccatcccctacaacccccgcactcatccctggctactcgcccctactccacccctgctcttctggaccccatgacctccctctctccctgcactctgccccaacagcccggaccacactcacccattgcagcaccttcacaaagccgaggggctccttgaccacccggaactgacccccagccaccagctgaggagagaaacagtggggaaggggtggggttgttggaggtacagggaggtgagcggcaaggctgcccatcaatgaccccaggggatggagcatgtgacctcggggagagggtgagaaggagaaagtgacaccttggggatggtgtgagccccagggtccaaggactggtgggaaggtctgaagagatggtgagtcagatggcagaggaagtcgggggtgagggagatggggatgaggtcaggactagttaaggagggggagcaggtttgaaacgtaaaggcgagtcggatggggaaggggttcgggtagagaatggggatggagtggggtgcattcgggtgggggggttgtgatggtgaaggtgagtcataacggggcaggagtcggtttggctcaggtgggggaagggtctgcaggggtaaaggtgtgttagacggcggtggcggtagatatttgaggtgatggggatggggaagggttgggactgattgggggtgagtttctgaggtggcaaagacgagagacatggcggagagggtctggactgattaaggtgggggagggctgggacacggcttcagtcgctatgtgttgggggtgaggaggctgggggttttggaaggagtaaaaccggattgtcccctaggtgtgctctgggggaaggggtggtcgcctatgggggtacagtctctgtttgggaggggcgggtgccagccctctcccccatccccgcccccacaccttctgtcgctctatttcctagcttatccgcagcaccccccatcttccttccactctcccctccccttgtcccttgccctcactccagccccaggcccctattcctcccctcgcggtcgccagtaataaacggggctccgggggcccccgctgcggcagtgaggacggccctcgctgcggcaaagagcgcactccttttctccacctcccccttcctccccttcacctgccgcagacccccatccccagcgccggggaccgggtctccgctgccagaccctggccaccacctcccagagtcggctggcctgagcgacccggcctaggcagccgggcggcggcgggctctgtccacggtgctggagcgcgtacctgattcaccacgtccatgtccgccagcagcagcatcagcaatgcagggggcgggaggctcggctagcaagggcggcgcggggcgcggcgggggcggcgcgcgctcgttggaacagcccaggcggctgcagccccgcccctcgcgccccctccttgcccgccacgcgcctgcgcacagcgggttgtaccacagtctcaccggcagccattccggcccggaggctggagccgtgagagcgtgcgggaatatgcgttgggaaaacacaagtcgagggccggggagaggagacctccctgctcggtcctacagtgtgacaactttgccaggctcttttctgagtttgttaaacatgttcactcatttaatgcttacagaagtcctacgttgtagggactattaggccgtttttacagacgaggaaaataattccccagagagcttaagtgactctcacaaggtcagccagctactagctggcagtgcccagagtccctgcagtttaaacacggttcaaggccttccaggttcctttttcatagtctgcattttaagcacaccctgaaactcctgcccccatctagccatctcccttatttctttcttcctctttgtcaaattaatgcctactcgaactctaccactttacctatttattccttagctctctcttaattggaataaccctccttcctgcgactaaaactaggcccatcaaggtcaacagtgatggctatgatgcaaaatccaaaatacagttggggcttaagatgctcaacttcggccaggcgcagtggctcatgcctgtaatcccagcactttgggaggccgaagtggacagtggatcacttgaagtcaggagtttgagactagcctggccaacatagtgaaaccccatctctattaaaaatacaaaaattagctggctgtggtggcaggcgcctgtaatcccagccacttgggaggctgaggcaggagaattgcttgaacccaggaggcggaggttgcactgaggcgagattgcaccactgcactccagcctgggcaacagagcgagactccatctcaaaaacaaacaagcaaacaaaaatactgagatactgtttttcatctttcagggtggtgagtatcaaaaagtttgataacgttccgtattggtaggttggccagaaacaagcgttctcataaatcgcctgtggaagtttcattggtataacgtgtagaaggcaatcgggcaaaatctaaaaaaaaaaaataacaaattcatttactgtttggttcaccttcatacttctaggaattcatcttacagatagactcatacatgtgctaaaagatatatgtataagataatacatgactgggctgtttattttttatttttttttgagacggagttcactctgttgcccaggctggagtgcagtggcatgatctccgcttactgcaacctccgcctcccgggttcaagcaattctccctgcctcaccctccctgagtagctgagattacaggcattcaccaccacgcccatctaatttttttttttttttttgtagttttagtagagatggggtttcgccatattggctagggtggtcatgaactcctgacctcatgtgatctgcctgcctcggcctcccaaagtgctgggattacaggtgtgagccactgggccaggccagggctgtttataataggataaagaatggacactcccaaagtgctcattgttggtagcctgtttaaataaactctgatactatgccgctgtcattataataacatggaactatggaatgattgccaagatatttagttaagtaaaaaatgcaagatgtcaaactgtgtggtaattgtgtacaaagagaagagaagggttatatcagacagagaatagctaacatttaaattgtggctgttttctgtcaagtactctttagagaactttgcctgtattactcacttaaattcttactgtaaccctatgtgacaggtacgacaactatctttgttttacagctgaataaactaagaggcggagaggaattttcctaagttcacacagctggtaaattggtagaaccaggatatgaacccaggaagtctggctccagcacctgttactcttagccactgtgctaacttatcagtacaccatcttttttttttcagcacaccatcttgtatgtctgtgaaagatacctgataatactatttgcttccagagggtagggaaacttttcactttatacccctttgtaccttttgagactccatctcaaataaaataaaaaaataaacagcctggtagtgtatcatcttatacatacaccttttagcacatatatgagtctacctgtaagaaattcctagaagtatgaagctgaacaaaacagtaaatgaatttatttttctagattttgcccagttgccttctacacaggttataccaatgaaacttccacaagcgatttatgagaacgcttgtttctggccaacctgccagtatggaacattatcaaactttttgatactcaccaccctgaaagatgaaaaacagcatctcagtagttttgttttgttttgtttttgagacagagtctcactctgttgcccaggctggagtgcagtggtgcaatctcagttcactgcaacctccgcctcctgggttcaaacgattctcctacctctgcctcctgagtagctgggattacaagcacaaaccaccacgtccggctatttttttttttttttttttttttttttagtagagatggggttttgccatgttggccaggctggttgtgaactcctgaccttaagggatccactgtccacttggcctcccaaagtgctgggattacaggtgtgagccactgcatctggcctacctttggaattttgaaccatctgaatgaatatcttttttttgagacagggtttccctgtgttgcccaggctggagtccagtggcatgaatatggctcactgcagcctcgacctcctgggctcaagcgatcctcctgcctcagcctcctatgtagctgggaccacaggcgtgagacaccatgcccagctaatttttaaatatttttgtagagacgaggtctcactttgttgcccaggctggtcttgaactcctgggctcaagtgatcctcccgcctcagcctcccaaagtgctgagatgacaggcatgagtcaccatgcccagctcaatacctgtttttttaaacatgaaaattcacacatatatgtaatggatacttccctgttgttgccttattggggaagcagtacacaggaggggttaaaagcatggatcttggcatcaaactgcttgaatttgaatgccacctctgatacttcttgtttgaccctggacaggtaagatggtttaaaatgatacctataaggttgttgcactgattcaacgagatgatcactgtaatgcagttagcacagggcccaataaatggttcattttacctcctacacatctctggaatccactcacttctcaccatctcctctgccacctcctctggctaaggcgaccatcattcctgccaattttagcatctccagtctcttccccctcccttctgttttcagcatagccgtcagaacatctatttaaaatgcaatgttaactatgtcactaccctactcaaatccctcccatggctccccactgcttataggaaaaatcccagagtttgggacctggcattcaaggttccacctgatctggcctcagtggcttctcccacctcatccctcaacagtctcccttcactctctgtgccctgcccatgacttgctgttctcacctaactccagcccaaccactttaagcctttgtttcaaggcctaatgtaactcaatcttctcagtcctagtctccaattctggcttccctcaaatttcagtcctggcttgattggcgcagattatacaaatgagacacccctgttctgggagctgggaagagttcctccccgactggtggtctcatcctgcaccactcccaatgctaccttcaattcctctggagtggggctgactcccactttggatgagacctgtcccgtgtttcaaccagttcagtttgccccgagagaaacccagagccggtgcctggcacatagtaaatgcctgataagccttcagtgagcgaatgtaaccccaaaggctgggtgaagagtaaagctggggcaagaagcagagaggacctctgggatctgtgtgggataagagtaggttactgttaggtggtctcaggaaagccaggtgggccctgagtgggttccccagggctgggagccctgacctttgctgtcacctatgttgtctactgatggatttaggttttcttttctttctcaggcagaaagtgggagatgggagacagagcgatctcaatttagccaccctaaaattcctgttgccgtcagaggacccctctgcctaagatgcatcacataccaggccgattccaacctccaggcctctcccctggcaggattcttctctgggtttccttgtcctttccttctcatccgtctacccttcctagtttgacctggctgagccctggtgaaatctctgcctctcttcctctctgggtccaagcacccctcacacccgctctctcccctttcctccatctctgtccagtgccctccccctcccccctcctccactctgcctccagctttttttggctgctgtctcttcctcctcctcctcctcctccctccttccctgacgctgaataatcaggcctggctgtcctggtttctggaaatacccgtgtgtgggcagtggctcagggctagaacaggggatggatggatgggggcccctgggcagccccagacccccagtgcaaagacaacaaaatccagggatgtggtccatgcctgcctcctgctggggaggggagggcaggaggtttattgagcagttggggaggggtgggaattcagagggcgtggacgcaggccatctcgtctcccaagtcctcctcatcgaagcgggagaggatggactcctcgtcgctatagagagagctggttccctgtgccagcaggtcactggcagcattgtccatctcatccagcgtcaggcgacacgcatctgcaatctcctgcttggccagggccacgaaacgtgggtctcgagcaaagaggcccagaccctctgagataagcacctgggggcacaggtgggatcagtgttgacggacggcacagtgtgcacagaaggttcagtgtggataaatgacgtgcccatgagggcatgtagggaagtcagtgggggacaggggtgagcagaggtcgtagggcaaagggatatctacatgcacaacacaggacctggggactcctttccgtcctcctccagtacccacctcctccccttctcccccatccgtcttgtctatatgccctctggactcacagcctccaccaagctgtcggcactgcccctcttcccatggctggggtccgagtgggttccaggcacgtgcagacaggtgaaggtgcgcagtgggccactggatctgccgaggtacccctccccccctgcgccctcttccaccaacaacagcggggcatacaggagccgaccccgctgaggtggtgttgcccaggaaccctgagccagaataaacatcagaggggcagggatggatgagtagggtatgagggtctaggactcaccgctgtgcctacttctttccctcagtatacaactggagtgaaattgaatgggtataagtcaggcttgagtttatttatgtaagagtgcaggaggcctgggtttaaatgtcagctctgccacttactagctgcatgatctggggtaaacctctcaggacctcagtttcctcacaagtacagtgagcattgtgtgcattcattcatatgtgtcctgttcttcagaaggctctgaggccaggcgcggtggcttatgcctgtaatcccagcactttgggaggctgagacaggcggatcacctgaggtcaggggtttgagaccagcccggccaacatggtgaaaccccatctctactaaaaatgcaaaaattagccaggcatggtggtgagcacctgtaatcccagctacttgggaggctgaggcaggagaattgcttggacccgggaggcaggggttacagtgagccaagatctcaacactgtactccagcctgggcagcagagcaaaactctgtctcaaaaaaaaaaaaaaaaaaaaaaaaaaaagggcctgatatgtgctgtgtttgagaaattcagcctaggctgcccccatctctccagaccccagaccccagcaccacctccacagcctcacctgagccctattgggccctgaatttcgcccacgatgataggtgcctgggatgggtaaatcctcacaactgccctggcgctgcagacactggatggtgaaggagggcttccgacctgggggtgggtggggcaccaggggcaaatagcaatgtcagtgcttccccagatctctgtcctgcaggcccgtgggggccccttggatccatccctgctctcacctgcaggtgtggggggcagcagacggcggcgtggtaccaggtgcccatccatgtatctctgagctctgtgaggtggcaaaaggactgagcacgggggagtccctgcctgctcatctaggtaggaaagcctgtgtgggtgggagggccaggggtgaacttgggtctgggcctggacctgggcctgggagatggggcacaaacagtcctccccgacccagttcccacccctcctccaccccagctcatgggttcatcccatgtggcatggccagtgtaccgatcagggacttcctcatcctcatcttgcttgttttgccctttggttcccttgggctgagaatttccttcttctgggatggtgaaaatgagagccccagagcctctcctggggaaagggaggcacgttaggcagaccagatccctcaatatgtggccctggacccctggttcctctcatcccatgccccaacccttacagaaacactgggcttttggatttttttgttgaggacaagtcacataaaattaaccattaaccattttaaagtgaccatgggcttttgtttaatagatgttcatctaattaggactgaaagtttcaaaaaaatcaaagttgacctgtagagagacaccttgaacacaaaactgggcatgtattaggagtggggggagcctgtaaaagctaggcactttatttttttatttctattttttattttctgagacgaggtcttactctgtcacttaggctggagtgcagcagcatgatctcagctcactgcagcctcaacctcccaggctcaatttatcctcccacctcagcctcccaagtagctgggactacaggcatgcgccaccatgctcggctatttttttattttttgtatggacggggtctcattatgttgtgcaggctggtcttgtactcctgggctcaagcgatcctcccaccttggctcccaaagtgctgggattacgagtgtgagccaccgtgcctaggcaagctagacactctgaaatttttttttaaaatttttctttaatctgcttatgtattgtctagcagctaagtgtttgacatgcattacctcatttcatcctttctttatccctgtgaagtaagtgctttgtcatcccccttaaacaggtgaggaaactgaggctcatagaaacgaagtgactaggcagggcacggtggctcaagcttgtaatcccagcactttgggaggctgaggtgggcagatcacctgaggtcaggagttcgaaaccagcctggccaacatggcaaaacctcgtctctactgaaaaaaaaaaaaaaaattagcctggcattatggcgcacgcctgtaatcccagctactcgggaggctcaggcaggagaatcgcttgaacccgggaggcagaggttgcagtgagccgaaattgtgccactgcactccagcctgggagacagagcgggactctgtctcaaaaaaaaaaaaaaaaaaaagtgattagctcaaggtcacttagcaaatggcagaggcagaatgtgaactgaaactcttggtttcacacaatgtgctttttgcattaaacctttgtattgcctttctcatatgaatctcttatcaccctctattcttacctgagcccttgaaacacctccattcttcccaaatttctgcttgaaggcctctaggccctccctcccacccccctcaacttcctgcctcctgaattgcctctatccagtgtctagtccttgccttccctcacaatctacttccagacacttgataatacctgtgggtgttggatccagcctggggcacactgggctgactggaggtgggagtccccctgtcatcatcactgggcccaaaggagagtgaatctggaagtctgtccccgacaggcagagacacagaaatcccggagccccggcgagctgagggctgggagaccatcgtggcctgtggagagtcacaggactgagtgttgcatgcactttgtggctaagtcatttggtcatataacatgtctcccccacaggtccatgaatgtgggccttgccctccaacagcaatggtaaatgtcaaataaataaatacgtaaataaataaataaatatttgcgatagggtcttgtcctgtcaccaggcgggagtgcagtggcatgatcacagctcactgtggcctcatcctcccaggttcaagcaatcctcctgcctcagcctcccaagtagctgggactacaggcttgcaccaccactcctagctaatttttaaatttttttgtagagaggcggtttcactattttgccaggactggtcttgaaccctagggttcaagcgatccttccaccctggactcccaaagtgctgggattataggcatgagccaccactcccagcctcaaataaatatttttctattgcagagggggcttctctgggggagcttcttcccagaagcagtgtcaaaatcactcaggggattgacgaagtattttacaatcaagttcctgggagagtgaaaacttgtccccactttgttagtttccaagtccttttcatcttcctcctccactccctcctgcccctcttcttcctcctcctctgtgtcacaggtgagggcctgccgcatctcaggacccaagtcctgcaggctccgcagaccagcctgtgggggtggagaaataggtaagcaggcagctcagggtctgaactttccctctgtttcccctgcaggcgggtagggtgggggaaggagtccttcagccaccctggccctccgtgaggcctggggcctcagtttccttatctgtgacatgggtttcacaagatcaaaatgggggtcagcctcagccacagcactgccacacgtgcccatccacactaggccctgccccgaagacctgaagggcggaagaggtgctaggggcggcgtcgttgcctagtagccctttttctttcctccgccggaatttgcggaaatagtcctggatcagaaatgtggcgtagaatttgcccacggtgacctcctcctctaggggcaagggagagaaggcaagatcacacaggggccctctgacccagcccacctcgccgcctctctacccaccagcatggacttcccctcgccctctgcccagcgctggttttgtggtggagagcgatcatctgccattcaggggctggcgcggggaactggggcggggatagctcaccgtctggtggggggatgacctcatctagcagcttctgtttcatccgcttccagatctttttgatgacaatccgcagctcctggttggcttgctccaggttccctgcgttggaggaggatgtggggcatgagccaataggaagaacctccacagctgccccctcactgttgggtggggggaacttcacaagctgctaccgcagatgcacaccgcccccattggacggggtggggggaaacaggcctggagaatcctgtcacccattctggggttcagagctaggagtggggcccatgattcaatgagtttgctccttgcaccctccccaggaacgatcccactcctgcccctcccctacaccttctgttttgatcttcagggatgtccggaccagggcaaagagtgtggcgttgaatgtcaccgtcccatctgagttgaggggcatgttcattgccacaagtctctgcaaacacgagagacatgaaacccactctgggaaaatgccgggtatgcaggaacgaatgtcaaggggcagaaacctctgaggatgcgatcaaacacccctccccacccaaggcagatcccttcccacccttgccatgtgatagacagttctctcaggagcctgggggtgggcaggtgcacagaccttgcaggccactcggtgtgggcacagcttcccaaatcccagagggggctggatacgtctcagcagggcaaccacatccaagtgtttgatgcggcccctggaggagttggggaggtaccactggattggcgatgcccccactagccctttctcaaggccccaccagctcatcactacctcctcctaccaataccccagagcttgccagggaagaactggagggcagtcagagagggcagaggatggggcagtggaaactttggggcatctattgactgggtaatgagatgcagcagtcggaggtttgggggctaggggactgtgtagggcaatacattgtcccctggattctaggtaagggtatagagggcatacttggccccagggtcatattcagaccagatcctcttgaattcatcaaggtgatgggggcccaggatggaccaatctctggtgagataatcaaagttgtccatgatcacagccacaaagagatttatgatctgtgggccagtgagcaagggagcagttaggtgaagggcagaacactgtcatggacggatggtgggaggctggggcgggcttatatggtcatgagtctctgggttgatcttgtcatcagaccagccctctcacccactatgaagatctgggctgcccacgtcacatccctgagcccctcagggccagcccccgtgacggtggtggtggttgtgaggaaatggttctcaccaggaaggcacagagcatgaagaagctgatgaaataggcgatggcaaaattgctaccacaggtaaactcttcaccagggccgaagtcagactcaggatcacaccgatttccgggaaggctggcaagcattatctcctgccatgcctcaccagtggcacacctggtgggagtcacacaggggtagcatcctgaaggggaggctatgaagtcatggtaaatggagttgggggaggactggggaatgaggagatgacctacttctcaccaggggctacatctggcacagataacatttcaatattttaacagccagtgtggccatgttgacgacagtcatgtttgcatcttacagatgaggcactgagacctgagaaggggaggcgtcttacagtcagaaagaaaatggctgaggctagaatactctaacagactcctcacatcatagccaggaaacatctcgggctgtatggagccccatgctgccatattattcccatagctcaagcagtctggggctcagagagggtgggtgggcacccacgggcataaggtggcaggggagtgagtagatgtcacctgaacagaagcagcacagcctgtggaaaggtctggaagttgttgtttcggtttatctgtgtgccatcctgaagagccaccttgccgaacatctgtggacacatcaaggctgtgtcagtggggtgaacccatgccccacccatttcacacctcctaatacctaaaggagcctcataaccctgacaaacagggcatcactgctgatctcatttcacagatgtgtagattgacccagggccgtccagcttgtctgtctacctgccacccctactttggggctattcttaacccatcccctgccagcagaggagtgcttaagggatgcttcctagggtccccacttgcctgcatgccaatgacggcatagatgaagaatatcattgcgatgagaagagccacatagggcaaggcctatagggatgggggaggggggcagagaatagatgcacaggctcaggcaaagaactataagccccagaatgcactgctttccctggcctgggcctactgggagatgcagtccatctccaaagtgccaaggactgtggtgtctctcaaatgtgaacatagtgttaagtagatagagtaaggtcagtgagaccagaggtgtgttggaaactgagagcccagaaaaaagagaaaattggaataataatttggaaatgggtatggcatgttgggagatgtagttctgagggtggtaaaggggcaggctgagaagtgtgaaatgggggcgaggtatggtcaaagggatggggtaggggattacctggaaggacttgatgaatgtccagagcaatgtgcggatcccttcacccttactgagaagcttgaccagccgcataactcggaagaggcgaaagaaggtaatggaaatgcgggagctgtcctcagagctctggggtgaggggtgcagtagggatgctcagtttgcatttactccagctatctccctatctcatgctttggccctcccagtacccaaatcactcaggccctagggtaatccggagggatggagggacagagggacatgggaaaagaagcagagagtccctgttattagggtgggctacctcgccaaggtggccaccattctggagggagatatggccaagaaaaaggtgatacaggagatgatgacatcataggcccaaatgaacaaggtgagatatgatggagcagatatagggggtgatggtggggtcattacacaggggacaatgggaaagtttatatggtagtggattaggattaggaaaaagtgggtaatgggaatggaagggagaggagagagtaaaggaggtgatggatcagagacattggagccaatagaggaaatgatggaaccagtggtgtcatagagatgatggagatgagagaaccgatggagaagccaatggagaagccagtgatggagatagggaaccagcagcgttgtcagttgaggtgacagaaccatgtagtacccaatggaggtgatggagccaatgatatagtcaatggtgatgacagagccatgaaagagccagtgtcagagatgatgaagttggtggagaaatgaagccaatgaagtcatcagaaaagatggagccaaagcaggagccagtgaacatgacggagccaatggatgggggatgtagaggcaatgaaagagataacagaaataacaggagaggcatttcaggagatggtggagccagtagataggttacaaaatggaatgagaaagccagtagagggggacttttgctgaacccaacagggactcagaagagatagagctagaatgaggactgagtctccaggagtagggaggatgtgcgtgggagccacccacccacgtgaaagggaaccccgggatagaggtgagggaaggtgtatagggcgagagtggattagtggaaaggccagttctcacattgacttcagtgacggcaatatccactatgctgcccaccacaataagagcgtcaaacgtgttccaggcatcagtgaagtaatgctgcaagtaggagaaaagcagtgccctgtcttctcaaagctcgcaagccagggtagggggccagtagtagtagggggcgccggaggggggcagggcttcgcttggatcacacgatgggcctgcacctgagtccctctcactccctagactcacactccctggctgctgcccgcatcgccaaccccagagctctgcaatgagctccactcccaaggaattcatccactggtgggtggggctagagaaggggggccaccttgggcttgaaggcgatgattttgagcaccatcacaatagtgaagaggccagtgaagaccatgttgaggatgtccatggcatagttgaagggagcagtctgctcatagtgctgcaggagaaaatcaggttgagatggagcctgaggcagagatgccgccacacccaaccaaatattccctggcctgggctgaggcgagtctggggacttgattgcactgtgtattggtcaaacctcttgcactgtctgcctcccattatggatactggaaagtttagttcttgattactagcttttcttgtagttaggcaaggccaggttgactagtgagacataaacataaatctgctgttggttagcagcttgtgtaaaaaaaattttgctttccgatgaaaggatcaaataaggagaggccccaggtgcagctctccctgccttgagtgtggttttgatgcctggagctgtgatcatgaaacaacaatcatgaaaatgaatgccaacttgctaagaatggtgaagcagaaagatagagcatgggtcccggatgaacaatgaacaaacagcctacctctgcacttctcaatacatgaggtaattaccacagttcattgactccaggaggcacatctttttacattttagaatctctgaaattggggcgcattttataacaaatggcaacttacaatggccactggctacttttttttttttttccacattcttacatctccgaaatcagaatgcaacttacaagtactggccatagacttaaagaaatgtggcaaatgtctttatagcttaagttgctgttagttggcagggggtttgttatttgcagccttaaatgttcccaatggttcccaagggattatgtggagataatagggtcaggagtctggcgggggtcaggcagggatcc

SEQ ID NO: 86 - DNA, 8459 bp, Homo sapiens
ggaggttgtggggccgccgccgcggagcaccgtccccgccgccgcccgagcccgagcccgagcccgcgcacccgcccgcgccgccgccgccgccgcccgaacagcctcccagcctgggcccccggcggcgccgtggccgcgtcccggctgtcgccgcccgagcccgagcccgcgcgccggcgggtggcggcgcaggctgaggagatgcggcgcggagcgccggagcagggctagagccggccgccgccgcccgccgcggtaagcgcagccccggcccggcgcccgcgggccattgtccgccgcccgccccgcgccccgcgcagcctgcaggccttggagcccgcggcaggtggacgccgccggtccacacccgccccgcgcgcggccgtgggaggcgggggccagcgctggccgcgcgccgtgggacccgccggtccccagggccgcccggccccttctggacctttccacccgcgccgcgaggcggcttcgcccgccggggcgggggcgcgggggtgggcacggcaggcagcggcgccgtctcccggtgcggggcccgcgccccccgagcaggttcatctgcagaagccagcggacgcctctgttcaacttgtgggttacctggctcatgagaccttgccggcgaggctcggcgcttgaacgtctgtgacccagccctcaccgtcccggtacttgtatgtgttggtgggagtttggagctcgttggagctatcgtttccgtggaaattttgagccatttcgaatcacttaaaggagtggacattgctagcaatgagctcccaaagccatccagatggactttctggccgagaccagccagtggagctgctgaatcctgcccgcgtgaaccacatgcccagcacggtggatgtggccacggcgctgcctctgcaagtggccccctcggcagtgcccatggacctgcgcctggaccaccagttctcactgcctgtggcagagccggccctgcgggagcagcagctgcagcaggagctcctggcgctcaagcagaagcagcagatccagaggcagatcctcatcgctgagttccagaggcagcacgagcagctctcccggcagcacgaggcgcagctccacgagcacatcaagcaacaacaggagatgctggccatgaagcaccagcaggagctgctggaacaccagcggaagctggagaggcaccgccaggagcaggagctggagaagcagcaccgggagcagaagctgcagcagctcaagaacaaggagaagggcaaagagagtgccgtggccagcacagaagtgaagatgaagttacaagaatttgtcctcaataaaaagaaggcgctggcccaccggaatctgaaccactgcatttccagcgaccctcgctactggtacgggaaaacgcagcacagttcccttgaccagagttctccaccccagagcggagtgtcgacctcctataaccacccggtcctgggaatgtacgacgccaaagatgacttccctcttaggaaaacagcttctgaaccgaatctgaaattacggtccaggctaaagcagaaagtggccgaaagacggagcagccccctgttacgcaggaaagacgggccagtggtcactgctctaaaaaagcgtccgttggatgtcacagactccgcgtgcagcagcgccccaggctccggacccagctcacccaacaacagctccgggagcgtcagcgcggagaacggtatcgcgcccgccgtccccagcatcccggcggagacgagtttggcgcacagacttgtggcacgagaaggctcggccgctccacttcccctctacacatcgccatccttgcccaacatcacgctgggcctgcctgccaccggcccctctgcgggcacggcgggccagcaggacaccgagagactcacccttcccgccctccagcagaggctctcccttttccccggcacccacctcactccctacctgagcacctcgcccttggagcgggacggaggggcagcgcacagccctcttctgcagcacatggtcttactggagcagccaccggcacaagcacccctcgtcacaggcctgggagcactgcccctccacgcacagtccttggttggtgcagaccgggtgtccccctccatccacaagctgcggcagcaccgcccactggggcggacccagtcggccccgctgccccagaacgcccaggctctgcagcacctggtcatccagcagcagcatcagcagtttctggagaaacacaagcagcagttccagcagcagcaactgcagatgaacaagatcatccccaagccaagcgagccagcccggcagccggagagccacccggaggagacggaggaggagctccgtgagcaccaggctctgctggacgagccctacctggaccggctgccggggcagaaggaggcgcacgcacaggccggcgtgcaggtgaagcaggagcccattgagagcgatgaggaagaggcagagcccccacgggaggtggagccgggccagcgccagcccagtgagcaggagctgctcttcagacagcaagccctcctgctggagcagcagcggatccaccagctgaggaactaccaggcgtccatggaggccgccggcatccccgtgtccttcggcggccacaggcctctgtcccgggcgcagtcctcacccgcgtctgccaccttccccgtgtctgtgcaggagccccccaccaagccgaggttcacgacaggcctcgtgtatgacacgctgatgctgaagcaccagtgcacctgcgggagtagcagcagccaccccgagcacgccgggaggatccagagcatctggtcccgcctgcaggagacgggcctccggggcaaatgcgagtgcatccgcggacgcaaggccaccctggaggagctacagacggtgcactcggaagcccacaccctcctgtatggcacgaaccccctcaaccggcagaaactggacagtaagaaacttctaggctcgctcgcctccgtgttcgtccggctcccttgcggtggtgttggggtggacagtgacaccatatggaacgaggtgcactcggcgggggcagcccgcctggctgtgggctgcgtggtagagctggtcttcaaggtggccacaggggagctgaagaatggctttgctgtggtccgcccccctggacaccatgcggaggagagcacgcccatgggcttttgctacttcaactccgtggccgtggcagccaagcttctgcagcagaggttgagcgtgagcaagatcctcatcgtggactgggacgtgcaccatggaaacgggacccagcaggctttctacagcgaccctagcgtcctgtacatgtccctccaccgctacgacgatgggaacttcttcccaggcagcggggctcctgatgaggtgggcacagggcccggcgtgggtttcaacgtcaacatggctttcaccggcggcctggacccccccatgggagacgctgagtacttggcggccttcagaacggtggtcatgccgatcgccagcgagtttgccccggatgtggtgctggtgtcatcaggcttcgatgccgtggagggccaccccacccctcttgggggctacaacctctccgccagatgcttcgggtacctgacgaagcagctgatgggcctggctggcggccggattgtcctggccctcgagggaggccacgacctgaccgccatttgcgacgcctcggaagcatgtgtttctgccttgctgggaaacgagcttgatcctctcccagaaaaggttttacagcaaagacccaatgcaaacgctgtccgttccatggagaaagtcatggagatccacagcaagtactggcgctgcctgcagcgcacaacctccacagcggggcgttctctgatcgaggctcagacttgcgagaacgaagaagccgagacggtcaccgccatggcctcgctgtccgtgggcgtgaagcccgccgaaaagagaccagatgaggagcccatggaagaggagccgcccctgtagcactccctcgaagctgctgttctcttgtctgtctgtctctgtcttgaagctcagccaagaaactttcccgtgtcacgcctgcgtcccaccgtggggctctcttggagcacccagggacacccagcgtgcaacagccacgggaagcctttctgccgcccaggcccacaggtctcgagacgcacatgcacgcctgggcgtggcagcctcacagggaacacgggacagacgccggcgacgcgcagacacacggacacgcggaagccaagcacactctggcgggtcccgcaagggacgccgtggaagaaaggagcctgtggcaacaggcggccgagctgccgaattcagttgacacgaggcacagaaaacaaatatcaaagatctaataatacaaaacaaacttgattaaaactggtgcttaaagtttattacccacaactccacagtctctgtgtaaaccactcgactcatcttgtagcttattttttttttaaagaggacgttttctacggctgtggcccgcctctgtgaaccatagcggtgtgcggcggggggtctgcacccgggtgggggacagagggacctttaaagaaaacaaaactggacagaaacaggaatgtgagctgggggagctggcttgagtttctcaaaagccatcggaagatgcgagtttgtgcctttttttttattgctctggtggatttttgtggctgggttttctgaagtctgaggaacaatgccttaagaaaaaacaaacagcaggaatcggtgggacagtttcctgtggccagccgagcctggcagtgctggcaccgcgagctggcctgacgcctcaagcacgggcaccagccgtcatctccggggccaggggctgcagcccggcggtccctgttttgctttattgctgtttaagaaaaatggaggtagttccaaaaaagtggcaaatcccgttggaggttttgaagtccaacaaattttaaacgaatccaaagtgttctcacacgtcacatacgattgagcatctccatctggtcgtgaagcatgtggtaggcacacttgcagtgttacgatcggaatgctttttattaaaagcaagtagcatgaagtattgcttaaattttaggtataaataaatatatatatgtataatatatattccaatgtattccaagctaagaaacttacttgattcttatgaaatcttgataaaatatttataatgcatttatagaaaaagtatatatatatatataaaatgaatgcagattgcgaaggtccctgcaaatggatggcttgtgaatttgctctcaaggtgcttatggaaagggatcctgattgattgaaattcatgttttctcaagctccagattggctagatttcagatcgccaacacattcgccactgggcaactaccctacaagtttgtactttcattttaattattttctaacagaaccgctcccgtctccaagccttcatgcacatatgtacctaatgagtttttatagcaaagaatataaatttgctgttgatttttgtatgaattttttcacaaaaagatcctgaataagcattgttttatgaattttacatttttcctcaccatttagcaattttctgaatggtaataatgtctaaatctttttcctttctgaattcttgcttgtacatttttttttacctttcaaaggtttttaattatttttgtttttatttttgtacgatgagttttctgcagcgtacagaattgttgctgtcagattctattttcagaaagtgagaggagggaccgtaggtcttttcggagtgacaccaacgattgtgtctttcctggtctgtcctaggagctgtataaagaagcccaggggctctttttaactttcaacactagtagtattacgaggggtggtgtgtttttcccctccgtggcaagggcagggagggttgcttaggatgcccggccaccctgggaggcttgccagatgccgggggcagtcagcattaatgaaactcatgtttaaacttctctgaccacatcgtcaggatagaattctaacttgagttttccaaagaccttttgagcatgtcagcaatgcatggggcacacgtggggctctttacccacttgggtttttccactgcagccacgtggccagccctggattttggagcctgtggctgcaaggaacccagggacccttgttgcctggtgaacctgcagggagggtatgattgcctgaccaggacagccagtctttactctttttctcttcaacagtaactgacagtcacgttttactggtaacttattttccagcacatgaagccaccagtttcattccaaagtgtatattgggttcagacttgggggcagaagttcagacacaccgtgctcaggagggacccagagccgagtttcggagtttggtaaagtttacagggtagcttctgaaattaactcaaacttttgaccaaatgagtgcagattcttggattcacttggtcactgggctgctgatggtcagctctgagacagtggtttgagagcaggcagaacggtcttgggacttgtttgactttcccctccctggtggccactctttgctctgaagcccagattggcaagaggagctggtccattccccattcatggcacagagcagtggcagggcccagctagcaggctcttctggcctccttggcctcattctctgcatagccctctggggatcctgccacctgccctcttaccccgccgtggcttatggggaggaatgcatcatctcactttttttttttaagcagatgatgggataacatggactgctcagtggccaggttatcagtggggggacttaattctaatctcattcaaatggagacgccctctgcaaaggcctggcagggggaggcacgtttcatctgtcagctcactccagcttcacaaatgtgctgagagcattactgtgtagccttttctttgaagacacactcggctcttctccacagcaagcgtccagggcagatggcagaggatctgcctcggcgtctgcaggcgggaccacgtcagggagggttccttcatgtgttctccctgtgggtccttggacctttagcctttttcttcctttgcaaaggccttgggggcactggctgggagtcagcaagcgagcactttatatccctttgagggaaaccctgatgacgccactgggcctcttggcgtctgccctgccctcgcggcttcccgccgtgccgcagcgtgcccacgtgcccacgccccaccagcaggcggctgtcccggaggccgtggcccgctgggactggccgcccctccccagcgtcccagggctctggttctggagggccactttgtcaaggtgtttcagtttttctttacttcttttgaaaatctgtttgcaaggggaaggaccatttcgtaatggtctgacacaaaagcaagtttgatttttgcagcactagcaatggactttgttgtttttctttttgatcagaacattccttctttactggtcacagccacgtgctcattccattcttctttttgtagactttgggcccacgtgttttatgggcattgatacatatataaatatatagatataaatatatatgaatatatttttttaagtttcctacacctggaggttgcatggactgtacgaccggcatgactttatattgtatacagattttgcacgccaaactcggcagctttggggaagaagaaaaatgcctttctgttcccctctcatgacatttgcagatacaaaagatggaaatttttctgtaaaacaaaaccttgaaggagaggagggcggggaagtttgcgtcttattgaacttattcttaagaaattgtactttttattgtaagaaaaataaaaaggactacttaaacatttgtcatattaagaaaaaaagtttatctagcacttgtgacataccaataatagagtttattgtatttatgtggaaacagtgttttagggaaactactcagaattcacagtgaactgcctgtctctctcgagttgatttggaggaattttgttttgttttgttttgtttgtttccttttatctccttccacgggccaggcgagcgccgcccgccctcactggccttgtgacggtttattctgattgagaactgggcggactcgaaagagtccccttttccgcacagctgtgttgactttttaattacttttaggtgatgtatggctaagatttcactttaagcagtcgtgaactgtgcgagcactgtggtttacaattatactttgcatcgaaaggaaaccatttcttcattgtaacgaagctgagcgtgttcttagctcggcctcactttgtctctggcattgattaaaagtctgctattgaaagaaaaag

SEQ ID NO: 87 - DNA, 2689 bp, Homo sapiens
ggctggggcctgaggcctggggctcacccacgcccccgccgacgcctgccgcgccgccgccacccccgccacccggagccccgggtggctcgcaggacacctgtacgtcgtgcggcggcttccggcggccagaggagctcggccgagtggacggcgacttcctggaggcggtgaagcggcacatcttgagccgcctgcagatgcggggccggcccaacatcacgcacgccgtgcctaaggccgccatggtcacggccctgcgcaagctgcacgcgggcaaggtgcgcgaggacggccgcgtggagatcccgcacctcgacggccacgccagcccgggcgccgacggccaggagcgcgtttccgaaatcatcagcttcgccgagacagatggcctcgcctcctcccgggtccgcctatacttcttcatctccaacgaaggcaaccagaacctgtttgtggtccaggccagcctgtggctttacctgaaactcctgccctacgtcctggagaagggcagccggcggaaggtgcgggtcaaagtgtacttccaggagcagggccacggtgacaggtggaacatggtggagaagagggtggacctcaagcgcagcggctggcataccttcccactcacggaggccatccaggccttgtttgagcggggcgagcggcgactcaacctagacgtgcagtgtgacagctgccaggagctggccgtggtgccggtgttcgtggacccaggcgaagagtcgcaccgaccctttgtggtggtgcaggctcggctgggcgacagcaggcaccgcattcgcaagcgaggcctggagtgcgatggccggaccaacctctgttgcaggcaacagttcttcattgacttccgcctcatcggctggaacgactggatcatagcacccaccggctactacggcaactactgtgagggcagctgcccagcctacctggcaggggtccccggctctgcctcctccttccacacggctgtggtgaaccagtaccgcatgcggggtctgaaccccggcacggtgaactcctgctgcattcccaccaagctgagcaccatgtccatgctgtacttcgatgatgagtacaacatcgtcaagcgggacgtgcccaacatgattgtggaggagtgcggctgcgcctgacagtgcaaggcaggggcacggtggtggggcacggagggcagtcccgggtgggcttcttccagccccccgcgggaacggggtacacggtgggctgagtacagtcattctgttgggctgtggagatagtgccagggtgcggcctgagatatttttctacagcttcatagagcaaccagtcaaaaccagagcgagaaccctcaactgacatgaaatactttaaaatgcacacgtagccacgcacagccagacgcatcctgccacccacacagcagcctccaggataccagcaaatggatgcggtgacaaatggcagcttagctacaaatgcctgtcagtcggagagaatggggtgagcagccaccattccaccagctggcccggccacgtctcgaagttgcgccttcccgagcacacataaaagcacaaagacagagacgcagagagagagagagagccacggagaggaaaagcagatgcaggggtggggagcgcagctcggcggaggctgcgtgtgccccgtggcttttaccaggcctgctctgcctggctcgatgtctgcttcttcccagcctgggatccttcgtgcttcaaggcctggggagcctgtccttccatgcccttgtcgagggaaagagacccagaaaggacacaacccgtcagagacctgggagcaggggcaatgaccgtttgactgtttgtggcttgggcctctgacatgacttatgtgtgtgtgtgtttttggggtggggagggagggagagaagagggggctaaatttgatgctttaactgatctccaacagttgacaggtcatccttgccagttgtataactgaaaaaggacttttctaccaggtatgaccttttaagtgaaaatctgaattgttctaaatggaaagaaaaaaagttgcaatctgtgcccttcattggggacattcctctaggactggtttggggacgggtgggaatgacccctaggcaaggggatgagaccgcaggaggaaatggcggggaggtggcattcttgaactgctgaggatggggggtgtcccctcagcggaggccaagggaggggagcagcctagttggtcttggagagatggggaaggctttcagctgatttgcagaagttgcccatgtgggcccaaccatcagggctggccgtggacgtggcccctgcccactcacctgcccgcctgcccgcccgcccgcatagcacttgcagacctgcctgaacgcacatgacatagcacttgccgatctgcgtgtgcccagaagtggcccttggccgagcgccgaactcgctcgccctctagatgtccaagtgccacgtgaactatgcaatttaaagggttgacccacactagacgaaactggactcgtacgactctttttatattttttatacttgaaatgaaatcctttgcttcttttttaagcgaatgattgcttttaatgtttgcactgatttagttgcatgattagtcagaaactgccatttgaaaaaaaagttatttttatagcagc

SEQ ID NO: 88 - DNA, 867 bp, Homo sapiens
ggctcagcacaggcacaaaccattgcccggcactggcccgtgctgcctgagaaggattggcacgggcacagaccactgcccccacctgccctgcgccatctacccaagaaggctcggcacgggcaccaaccactgcctccaactgccccatgctgcctgagaaggcactgcacggccacccccaactgccccgcactgtccctacccgggcagccatgcgagcggctggaactctgctggccttctgctgcctggtcttgagcaccactgggggcccttccccagatacttgttcccaggaccttaactcacgtgtgaagccaggatttcctaaaacaataaagaccaatgacccaggagtcctccaagcagccagatacagtgttgaaaagttcaacaactgcacgaacgacatgttcttgttcaaggagtcccgcatcacaagggccctagttcagatagtgaaaggcctgaaatatatgctggaggtggaaattggcagaactacctgcaagaaaaaccagcacctgcgtctggatgactgtgacttccaaaccaaccacaccttgaagcagactctgagctgctactctgaagtctgggtcgtgccctggctccagcacttcgaggtgcctgttctccgttgtcactgacccccgcctcttcagcaagaccacagccatgacaaacaccaggatgcatgctccttgtcccctcccacccgcctcatgacccagcctcacagaccctctcaggcctctgacgagtgagcgggtgaagtgccactgggtcaccgcagggcagctggaatggcagcatggtagcacctcctaacagattaaatagatcacatttgcttctaaaatt

SEQ ID NO: 89 - DNA, 1972 bp, Homo sapiens
cgcggccggcagcgccagcgctggaatcgcccccgcgcctgggagtggcctcgcgaggcgggcgcgcgccccggggccgaggaatccgcctgcccgcccaggcgtcggccacgagagagcgggagcctcgctggtccccatttcagaggtggaggaagacctgggccgtgctctacccggccagtccccacggcgtagcgcggctcgagttctttgaccataaggggtcgagctctgggggtggccgagggagctcgcgccgcctggactgcaaagtgatccgtctggctgagtgtgtgagtgtggcccccgtcaccgtggagaccccccctgagcccggcgccactgccttccgcctggacactgctcagcgctcgcacctgctggcggccgacgcgccgtccagtgcagcctgggtgcagacgctgtgccgaaacgcctttccgaaaggcagctggactctggcgcctaccgataacccacctaagctttctgccctggagatgctggagaactccttgtacagccctacctgggaaggatcccaattctgggtaacggtgcagaggactgaggccgccgagcgctgtggcctgcatggctcctacgtgctgagggtggaggctgaaaggctgactctcctgaccgtgggggcccagagtcagatactggagccactcctgtcctggccctacactctgttgcgtcgctatggccgggacaaggtcatgttctctttcgaggccggccgccgctgcccctcaggccctggaaccttcaccttccagacggcacagggaaatgacatcttccaggcagttgagactgccatccaccggcagaaggcccagggaaaggccggacaggggcacgatgttctcagagctgactcccatgaaggggaggtggcagaggggaagttgccttccccacctggcccccaagagctcctcgacagtcccccagccctgtatgctgagcccttagactccctgcgcattgctccatgcccttcccaggactccctatactcagaccccttggacagcacgtctgctcaggcaggagagggagtacaacggaagaaacctctctattgggacttgtatgagcatgcgcagcagcagttgctgaaggccaagctgacagaccccaaagaggatcccatctatgatgaacctgagggcctggccccagtccctccccagggcctttatgatctgcctcgggagcccaaggatgcatggtggtgccaagctcgggtgaaggaggagggctatgagctcccctacaaccctgccactgatgactacgctgtgccaccccctcggagcacaaagcccctccttgctcccaagccccagggcccagccttccctgaacctggtactgcaactggcagtggcatcaaaagccacaactcagccctgtacagccaggtccagaagagcggggcctcagggagctgggactgtgggctctctagagtagggactgacaagactggggtcaagtcagagggctctacctgagaaggacggcaaggctgaggtggctaagggggaccatggggaggtggcactagggatcaaagaagatggttagaaccagcagaagccagagggtgggaggggccatgctgtgtgagaccaggggaccagagggatgggagagtcaagggaaggacaatcccaggaagtcctaagaagtggggcagatggcagggctgaggatgggctctgcatcccccaaagccatcccttccctacttccccaaatgaagggacggctgtgggaccaggtctgtggaaagtggtgcatggtcagaatgggtgcagtttgaggggcctgtgtggaggcctcagggagatgttggactgtgcctggatccttactcctgcattgttctttgccagagacctatttaaaaattttaaaattctcattaaagtcaaaaaaaaaaaaaaaaaaa

SEQ ID NO: 90 - DNA, 2089 bp, Homo sapiens
gaattcgggggtgcctcctgcagcccgcctgctgggcaggccggcgcggcccggccatggagtcctacgacatcatcgccaaccagcctgtggtcatcgacaacggttcgggggtgattaaagctggctttgcaggagaccagattcccaaatactgtttcccaaactatgtcgggcggccgaagcacatgcgggtgatggctggagccctggagggggacctcttcatcggaccaaaagcagaggagcaccgggggctgctgaccatccgctaccccatggagcacggcgtggtgcgagactggaacgacatggaacgcatctggcagtacgtctactccaaggatcagctgcagaccttctcggaggagcatcctgtgctcctcacggaggccccgctcaacccgagtaagaaccgggagaaggcggcagaggtgttctttgagaccttcaacgtgccggccctgttcatctccatgcaggctgtgctcagtctgtacgcaacaggacgcacgacaggagtggttctagactcaggggacggggtcactcatgctgtgcccatctatgagggctttgccatgcctcactccatcatgcgggtggacattgccggccgcgacgtctcccgctacctccgactcctgctgcgcaaggaaggggttgacttccatacctcggctgagtttgaggttgtccggacaatcaaagagcgagcgtgctacctgtccatcaacccacagaaggatgaggctctggagacggagaaggtgcagtacacgttgccagacggcagcacgcttgatgtggggcctgcacgattccgggcccccgagctgctgttccagccggaccttgtcggggatgagagtgaggggctccatgaggtggtggccttcgccatacacaagtccgacatggacctgcgccggacgctgttcgccaacatcgtgctctcaggtggctcaacgcttttcaaaggcttcggagaccgattactcagtgaagtgaagaagcttgccccaaaggatatcaaaatcaagatctcagccccgcaggaacggctgtactccacatggattggcggctccatcctggcctcgctggacacttttaagaagatgtgggtgtccaaaaaggagtatgaagaggatggctcccgtgctattcatcgcaaaactttctagtgcccaaggagggcggggcatgttgggagagggggagggaggggagacagagcctttaaccctttttggtcttggctcgtatactaggcttagggtcccctgcatgccctgaacccctgggtgggtggcacagcagtgcccccctgcagccttcccctctacacaggacatgcacacacaagtaacattgagctgcatggacaggagccttgagctggcgtgtgggaattgagcgccatgtcaggctgttgtgggtatccccctggcagggccagctaggcctgtggttcccctgctccgactctcagggctgcctccctgagctccagggccagaatgcctggatgcctgggtagccagtttggggagtgggctgcaaggggcagccagcagcgcccactggtgtgtcactgcatccattgccacctcctgttcgtgacctgacagggtgacacagcccctttcacactctgtcctcctatcttcctgggtagatgccctggtgtagggctgagtactgaatggtcttccatccccagcaagggggtgcagcccagggtcaggcccttcagagccagggctagaggatgcacggtggctagagccagctgcactatccttttcagagcacttcatccacttgctcctccctctaccctcggcaccctgggtgggaaagggttgatgctcatcatttattgaggggaagccacttaataaggagtcagacctaaaagggggtgggggacattttcttacctcacccaagaaagaggtcgtcacttttgctgtggccagggccccacctccctctctcagatatgtacaataatttaacacggttgcctgaaaaaaacttttgtaaatcattatagtaataattatggacaaggcccgaattc

SEQ ID NO: 91 - DNA, 1182 bp, Homo sapiens
tcagcagagtgaccgcgccgtgtcaactggcctcaccgtgcaggcgggtgtgggggtcagcgagacgagacgcttcctcccaggggtgtccgcagactgcccagagggcagccgcctcacagattagagatggagtttcactgtgtcggccaggctggtctcaaaccccctgagttcaggtgatccacctgcctcagcctcgcaaagtattggaattacagatctccatttgccaggagatgcccagcctggaggtgatcacgctcagcatctccaccctggagcctgtgagccggtgccagcgcctgagtgagctgtacctgcggaggaaccgcatccccagcctggctgagctcttctacctgaaggggctgccgcgtctgcgggtgctgtggctggccgagaacccgtgctgcggcaccagcccccacgcctaccgcatgaccgtgctgcgcaccctgccgcgcctacagaagctggacaaccaggctgtgacggaggaggagctgtcccgtgcactgagtgagggagaggagatcactgcggccccagagagagagggcacaggccacggcggccccaagctatgctgcacactgagctccctcagctccgctgctgagactggccgggacccgctggacagcgaggaggaggcaaccggcgcccaggatgaacgtggcctgaagccgccttcccggggccagtttccttccctctcagccagggatgcctcgagcagccacaggggcaggaacgtcctgactgccatcctgctgctgctgcgggagctggatgcagaggggctggaggccgtgcagcagactgtgggcagccggctgcaggccctgcgtggggaagaggtgcaggagcacgccgagtgaccgcaggacctgaacgccgctccagcctccacggggaccccagcgtcttccccagcccccgggagctggagggtggctgccatggccgcagccccggccccacacaaaagcctccccggtttgccacatcggccgagggcaggagtgggtgttaggtactggctaaccggggcggtggagatgcctgtctacaccagtcctgtcccaggactccccttctgtggtctggaggttctaggctggcctgggctcttaaagggaggattttgcaggctgtcctccctaataaaagattttc

SEQ ID NO: 92 - DNA, 561 bp, Homo sapiens
ttttgtcattaaaaagttactactttagtggaagatctggagtagctacaggaaaaactctttgggaaagtccaggtggtagagagaaaatacacatttaagcactaggaataactgtgatgccacgctcagagcaggtgggagaaagcagttctctctgtttgacttgcagaaggcaatctttcttcacagagaggaccacagcattcagtcctctagaaagttctattagtcttgatcttgtcttgttttgctttgtattttgaagcatccctgggttcactgctgggattgctccaatcatcggcttcaggcgtggtcttgtaatggcgccatgcggacttattaaaaactggaagtctctcaaatgactcaattgaaagagccttcaaataaatgacagcatcagtacccactccttccatggaatacagtttcagatctcctggaaaatatctagcaagcagacgggaaattggcaaacctaaccaaatccagccagaggggcagctctggtaggctccggctgggttctggagccgtagaatacatgtagttaaa

SEQ ID NO: 93 - DNA, 3917 bp, Homo sapiens
  misc_feature (72)..(72): n is a, c, g, or t
  misc_feature (138)..(138): n is a, c, g, or t
  misc_feature (140)..(140): n is a, c, g, or t
  misc_feature (210)..(210): n is a, c, g, or t
  misc_feature (216)..(216): n is a, c, g, or t
  misc_feature (219)..(219): n is a, c, g, or t
  misc_feature (223)..(223): n is a, c, g, or t
  misc_feature (242)..(242): n is a, c, g, or t
  misc_feature (259)..(259): n is a, c, g, or t
  misc_feature (261)..(261): n is a, c, g, or t
  misc_feature (267)..(267): n is a, c, g, or t
  misc_feature (274)..(275): n is a, c, g, or t
  misc_feature (279)..(279): n is a, c, g, or t
  misc_feature (289)..(289): n is a, c, g, or t
  misc_feature (293)..(293): n is a, c, g, or t
  misc_feature (510)..(510): n is a, c, g, or t
  misc_feature (524)..(524): n is a, c, g, or t
  misc_feature (535)..(535): n is a, c, g, or t
  misc_feature (548)..(548): n is a, c, g, or t
  misc_feature (567)..(567): n is a, c, g, or t
  misc_feature (575)..(575): n is a, c, g, or t
  misc_feature (580)..(580): n is a, c, g, or t
  misc_feature (593)..(593): n is a, c, g, or t
  misc_feature (614)..(614): n is a, c, g, or t
  misc_feature (634)..(634): n is a, c, g, or t
  misc_feature (663)..(663): n is a, c, g, or t
  misc_feature (678)..(679): n is a, c, g, or t
  misc_feature (686)..(686): n is a, c, g, or t
  misc_feature (694)..(694): n is a, c, g, or t
  misc_feature (724)..(724): n is a, c, g, or t
  misc_feature (728)..(728): n is a, c, g, or t
  misc_feature (741)..(742): n is a, c, g, or t
  misc_feature (751)..(751): n is a, c, g, or t
  misc_feature (759)..(759): n is a, c, g, or t
  misc_feature (780)..(780): n is a, c, g, or t
  misc_feature (812)..(812): n is a, c, g, or t
  misc_feature (820)..(820): n is a, c, g, or t
  misc_feature (826)..(826): n is a, c, g, or t
  misc_feature (1105)..(1105): n is a, c, g, or t
  misc_feature (1753)..(1753): n is a, c, g, or t
  misc_feature (1969)..(1969): n is a, c, g, or t
  misc_feature (3603)..(3603): n is a, c, g, or t
  misc_feature (3606)..(3606): n is a, c, g, or t
  misc_feature (3615)..(3615): n is a, c, g, or t
  misc_feature (3617)..(3617): n is a, c, g, or t
  misc_feature (3624)..(3624): n is a, c, g, or t
  misc_feature (3630)..(3630): n is a, c, g, or t
  misc_feature (3642)..(3642): n is a, c, g, or t
  misc_feature (3680)..(3680): n is a, c, g, or t
  misc_feature (3696)..(3696): n is a, c, g, or t
  misc_feature (3718)..(3718): n is a, c, g, or t
  misc_feature (3722)..(3722): n is a, c, g, or t
  misc_feature (3733)..(3733): n is a, c, g, or t
  misc_feature (3743)..(3743): n is a, c, g, or t
  misc_feature (3745)..(3745): n is a, c, g, or t
gcgccctccgcgcgcctggaggaggccgtgtggaggccctactgaggcgccaggcctggcccggctgggccncgcgggccgccgccttcgcctccgggggggccgggccttcctgttcgcgacaagcccgccgggatncncgggccctgggcccggccaccgtcctggggccgagggcgcccgacggccaggatctcgctgtaggtcagncccgcncancctnctgcgcccagaagcccacnccgccaccgtctgctgncnccccgnccctcanngagntgtccgagtngacncacctcgagaggtcgagggtgtccgccggccccagcacccaggggacgcgctggaaagcaaacaggaagattcccggagggaaactgtgaatgcttctgatttagcaatgctgtgaataaaaagaaagattttatacccttgacttaactttttaaccaagttgtttattccaaagagtgtggaattttggttggggtggggggagaaggagggatncaactcgcccggtnggggagctaantcttacttttaanttttccgcaccttatcaantgcaaaangcgtncttgcatttgggnggtttttatttttatatacgnttatataaatatatataaantgagcttgcttctttcttgctttgaccanggaaagaaatatgannccctttnctttaagntttatttaacttttcttttggacttttggnagtnggttttttttggnnggggtgggnttttttgngaaacagctacagctttgggncattttttaactactgtattcccacaaggaanccccaganatttangtatcttgatgtttcaagacatttatgtgttgataattttttaattatttaaatgtacttatattaaagaaaaatatcaagtccctacattttcttttgttcttgatagtacccaaagttaaatgtatcacattgaagaaggctagaaaaaaaggatgagtaatgtgatcccttggttatccagaagtattgtttacattaaactccctttcatgttaaccaaacaagtgagtagctcacgcagcaatgtttttaataggatttttagacactgagggntcactccaaggatcagaagtatggaattttctgccaggctcaacaagggtctcatatctaacttcctccttaaaacagagaaggtcaatctagttccagagggttgagccaggtgcccataattacatctttggagaggatttgatttctgcccagggatttgctcaccccaaggtcatctgataatttcacagatgctgtgtaacagaacacagccaaagtaaactgtgtaggggagccacatttacataggaaccaaatcaatgaatttaggggttacgattatagcaatttaagggcccaccagaagcaggcctcctcgaggtcgaggagtcaatttgcctctgtgtgcctcagtggagacaagtgggaaaacatggtcccacctgtgcgagaccccctgtcctgtgctgctcactcaacaacatctttatgttgctttcaccaggctgagaccctaccctatggggtatatgggcttttacctgtgcaccagtgtgacaggaaagattcatgtcactactgtccgtggctacaattcaaaggtatccaatgtcgctgtaaattttatggcactatttttattggaggatttggtcagaatgcagttgttgtacaactcataaatactaactgctgattttggcnacatgtgtgctccaaatgatctggtggttatttaacgtacctcttaaaattcgttggaaacgatttcaggtcaactctgaagagtatttgaaagcaggacttcagaacagtgtttgatttttattttataaatttaagcattcaaattaggcaaatctttggctgcaggcagcaaaaacagctggacttatttaaaacaacttgtttgtgagtttncttatatatatattgattatttgggatgacacacatgcagtagcactttggtaagagtaaaagagtaacgcagattatgttgtcaggtcgttcttatctagagaagagctatagcagatctcggacaaactcagaatatattcactttcatttgggacaggattccctccacaactcagtttcatatattattccgtattacatttggggagctaaattaccataaaatgtcagcaaatgtaaaaatttaatttctgaaaagcaccattagcccatttcccccaaattaaacgtaaatgttttttttcagcacatgttaccatgtctgacctgcaaaaatgctggagaaaaatgaaggaaaaaattatgtttttcagtttaattctgttaactgaagatattccaactcaaaaccagcctcatgctctgattagataatcttttacattgaacctttactctcaaagccatgtgtggagggggcttgtcactattgtaggctcactggattggtcatttagagtttcacagactcttaccagcatatatagtatttaattgtttcaaaaaaaatcaaaccgtagttgttttggcgataggtctcacgcaacacatttttgtatgtgtgtgtgtgtgcgtgtgtgtgtgtgtgtgtgaaaaattgcattcattgacttcaggtagattaaggtatctttttattcattgccctcaggaaagttaaggtatcaatgagacccttaagccaatcatgtaataactgcatgtgtctggtccaggagaagtattgaataagccatttctactgcttactcatgtccctatttatgatttcaacatggatacatatttcagttctttctttttctcactatctgaaaatacatttccctccctctcttccccccaatatctccctttttttctctcttcctctatcttccaaaccccactttctccctcctccttttcctgtgttctcttaagcagatagcacatacccccacccagtaccaaatttcagaacacattctctcccccttcacataaaggaacatggtttgtcagcctttctcctgtttatgggtttcttccagcagaacagagacattgccaaccatattggatctgcttgctgtccaaaccagcaaactttcctgggcaaatcacaatcagtgagtaaatagacagcctttctgctgccttgggtttctgtgcagataaacagaaatgctctgattagaaaggaaatgaatggttccactcaaatgtcctgcaatttaggattgcagatttctgccttgaaatacctgtttctttgggacattccgtcctgatgattttttattggttggtttttatttttggggggaatgacatgtttgggtcttttatacatgaaaatttgtttgacaataatctcacacaacatattttacatctgagcacaatgcctttttgtttaccgtagcgtatacatttgttttgggatttttgtgtgtttgttgggaattttgtttttagccaggtcagtattgatgaggctgatcatttggctctttttttccttccagaagagttgcatcaacaaagttaattgtatttatggatgtaaatagattttaagcttgaanaanaaaatattntnaatcccnatgacntgtttgtcaagntttttgtgtgtgtttctaaggactttttcttagggttnctaaatcctgtagggnaaaacatgcttcctttctactntggntattttagacnttaaactgancnacttcttaatcacttttgtaaacagctaatagcatggtcccaattttttttaagttcactttttttgttctaggggaaatgaatgtgaaaaaaaagaaaaagaactgttggttatttgtgttattctggatgtataaaaatcaatggaaaaaaataaactttcaaattgaaa

SEQ ID NO: 94 - DNA, 2199 bp, Homo sapiens
gtcgccgctgccgggttgccagcggagtcgcgcgtcgggagctacgtagggcagagaagtcatggcttctccgtccaaaggcaatgacttgttttcgcccgacgaggagggcccagcagtggtggccggaccaggcccggggcctgggggcgccgagggggccgcggaggagcgccgcgtcaaggtctccagcctgcccttcagcgtggaggcgctcatgtccgacaagaagccgcccaaggaggcgtccccgctgccggccgaaagcgcctcggccggggccaccctgcggccactgctgctgtcggggcacggcgctcgggaagcgcacagccccgggccgctggtgaagcccttcgagaccgcctcggtcaagtcggaaaattcagaagatggagcggcgtggatgcaggaacccggccgatattcgccgccgccaagacatacgagccctaccacctgcaccctgaggaaacacaagaccaatcggaagccgcgcacgccctttaccacatcccagctcctcgccctggagcgcaagttccgtcagaaacagtacctctccattgcagagcgtgcagagttctccagctctctgaacctcacagagacccaggtcaaaatctggttccagaaccgaagggccaaggcgaaaagactgcaggaggcagaactggaaaagctgaaaatggctgcaaaacctatgctgccctccagcttcagtctccctttccccatcagctcgcccctgcaggcagcgtccatatatggagcatcctacccgttccatagacctgtgcttcccatcccgcctgtgggactctatgccacgccagtgggatatggcatgtaccacctgtcctaaggaagaccagatcaatagactccatgatggatgcttgtttcaaagggtttcctctccctctccacgaaggcagtaccagccagtactcctgctctgctaaccctgcgtgcaccaccctaagcggctaggctgacagggccacacgacatagctgaaatttcgttctgtaggcggaggcaccaagccctgttttcttggtgtaatcttccagatgcccccttttcctttcacaaagattggctctgatggtttttatgtataaatatatatatataataaaatataatacatttttatacagcagacgtaaaaattcaaattattttaaaaggcaaaatttatatacatatgtgctttttttgtatatctcaccttcccaaaagacactgtgtaagtccatttgttgtattttcttaaagagggagacaaattatttgcaaaatgtgctaaagtcaatgatttttacgggattattgacttctgcttatggaaaacaaagaaacagacacagtgcacacagaaaatattagatatggagagattattcaaagtgaaggggacacatcatatttctgcattttacttgcattaaaagaaacctctttatatactacagttgttcctatttttcccccgccccccaccgccccaccacacacatatttttaaagtttttccttttttaagaatatttttgtaagaccaatacctgggatgagaagaatcctgagactgcctggaggtgaggtagaaaattagaaatacttcctaattcttctcaaggctgttggtaactttatttcagataattggagagtaaaatgttaaaacctgttgagaggaattgatggtttctgagaaatactaggtacattcatcctcacagattgcaaaggtgatttgggtgggggtttagtaattttctgcttaaaaaatgagtatcttgtaaccattacctatatgctaaatattcttgaacaattagtagatccagaaagaaaaaaaaaatatgctttctctgtgtgtgtacctgttgtatgtcctaaacttattagaaaattttatatacttttttacatgttggggggcagaaggtaaagccatgttttgacttggtgaaaatggggttgtcaaacagcccattaagctccctggtatttcaccttcctgtccatctctcccctccctccggtatacctttatccctttgaaagggtgcttgtacaatttgatatattttattgaagagttatctcttattctgaattaaattaagcatttgttttattgcagtaaagtttgtccaaactcacaattaaaaaaaaaaaaaaaaa

SEQ ID NO: 95 - DNA, 1480 bp, Homo sapiens
gcggagaaagccagtgggaacccagacccataggagacccgcgtccccgctcggcctggccaggccccgcgctatggagttcctctgggcccctctcttgggtctgtgctgcagtctggccgctgctgatcgccacaccgtcttctggaacagttcaaatcccaagttccggaatgaggactacaccatacatgtgcagctgaatgactacgtggacatcatctgtccgcactatgaagatcactctgtggcagacgctgccatggagcagtacatactgtacctggtggagcatgaggagtaccagctgtgccagccccagtccaaggaccaagtccgctggcagtgcaaccggcccagtgccaagcatggcccggagaagctgtctgagaagttccagcgcttcacacctttcaccctgggcaaggagttcaaagaaggacacagctactactacatctccaaacccatccaccagcatgaagaccgctgcttgaggttgaaggtgactgtcagtggcaaaatcactcacagtcctcaggcccatgtcaatccacaggagaagagacttgcagcagatgacccagaggtgcgggttctacatagcatcggtcacagtgctgccccacgcctcttcccacttgcctggactgtgctgctccttccacttctgctgctgcaaaccccgtgaaggtgtatgccacacctggccttaaagagggacaggctgaagagagggacaggcactccaaacctgtcttggggccactttcagagcccccagccctgggaaccactcccaccacaggcataagctatcacctagcagcctcaaaacgggtcagtattaaggttttcaaccggaaggaggccaaccagcccgacagtgccatccccaccttcacctcggagggacggagaaagaagtggagacagtcctttcccaccattcctgcctttaagccaaagaaacaagctgtgcaggcatggtcccttaaggcacagtgggagctgagctggaaggggccacgtggatgggcaaagcttgtcaaagatgccccctccaggagagagccaggatgcccagatgaactgactgaaggaaaagcaagaaacagtttcttgcttggaagccaggtacaggagaggcagcatgcttgggctgacccagcatctcccagcaagacctcatctgtggagctgccacagagaagtttgtagccaggtactgcattctctcccatcctggggcagcactccccagagctgtgccagcaggggggctgtgccaacctgttcttagagtgtagctgtaagggcagtgcccatgtgtacattctgcctagagtgtagcctaaagggcagggcccacgtgtatagtatctgtatataagttgctgtgtgtctgtcctgatttctacaactggagtttttttatacaatgttctttgtctcaaaataaagcaatgtgttttttcgg

SEQ ID NO: 96 - DNA, 556 bp, Homo sapiens
gttgactttttcttttatctttgcaggatctactccaagtgaccaacagcaaaacaaattacgaagttcatagacgagatttgttcaacactgcaattgtttgttagatgtaaaccctgtgactatagtacgttgcttcttgttcttcacaattcatgacttaagtaccaaaatgcataccagttattatatattgccaagaattaaatgataaacttagagactgattagactgaaaatgcctaatcgatatatatattcttgtgcctagtactttaccacaaatacagtgtaatatcatcagtccaaaactgcattacttttgtaaaaacactggttaatttgtataagatattatagagctttttatgctttagaagttaaacaatatctttgggggggaactaatttattttcatcacttgaaatgtggtagctcttacaaagtttattgatttgatttttttaaaaatcaaaagccaattgaacaacaggatatatagactgataaatatttaggctgaatagtattttaacacttgtcttcaacttgatt

SEQ ID NO: 97 - DNA, 1244 bp, Homo sapiens
caccccgccatggagacctcagcactcaagcagcaggagcagcccgcggcgaccaagatcaggaacctgccctgggttgaaaaataccggccacagaccctgaatgatctcatttctcatcaggacattctgagtaccattcagaagtttatcaatgaagaccgactgccacacttgcttctctacggtcccccagggacaggcaagacatctaccatcctagcctgtgcgaaacagctatataaagacaaagaatttggctccatggtcttggagctgaatgcttcagatgaccgaggaatagacatcattcgaggaccgatcctgagctttgctagcacaaggacaatatttaagaaaggctttaagctagtgatcttggatgaagcagacgccatgactcaggacgcccagaatgccttgagaagagtaattgagaaattcacagaaaataccagattctgcctcatctgtaactatctgtcaaagatcatccctgccttgcagtcccgctgcacgaggtttcggttcggtcccctgactcctgaactcatggttccccgcctggaacatgtcgtggaagaagagaaagttgatataagtgaagatggaatgaaagcactagtcactctttccagtggagacatgcgtagggctctgaacattttgcagagcaccaatatggcctttgggaaggtgacagaggagactgtctacacctgcaccgggcacccgctcaagtcagacattgccaacatcctggactggatgttgaatcaagatttcaccacagcctacagaaatattacagagttgaaaactctgaaggggttggcactgcatgatatcctgacagagatacacttgtttgtgcatagagttgactttccatcttcagttcgaatacatttattgaccaaaatggcagacattgagtacaggctttctgttggcaccaacgagaagatccagctgagctccctcattgctgcatttcaagtcaccagagacctgattgttgcagaggcctagatgctctgagggccattcacaattctcagggctcagcagtgatgggtgttcagaggacagttccaggataaactgctgcctggggctgtggatgaatcagtcaccccgaatcttggaaaaaccccttccaggagaggatgggcaggcatttaaaaagtaccatttttgtggttgtttggagcaggatgtacaaaataattttaatgtattaa

SEQ ID NO: 98 - DNA, 2366 bp, Homo sapiens
ggcctccccgcccgcctgcccctcggaggaggacgagagcctgaagggctgtgagctgtacgtgcagctgcacgggatccagcaggtcctcaaagactgtatcgtccacctctgcatctccaagcccgaacgccccatgaagttcctccgggagcacttcgagaagctggagaaggaagaaaacaggcagattttggcgcggcaaaagtcaaactcacagtcggactcccatgatgaggaggtgtcgcccacccccccgaaccctgtggtgaaggcccgccgccggcgaggaggcgtgagtgccgaggtgtacaccgaggaggacgccgtgtcctacgtcaggaaggtgattcccaaggactacaaaaccatgactgcgctggccaaggccatctccaagaacgtgctcttcgctcacctggatgacaacgagaggagtgacatattcgatgccatgttccctgtcactcacatcgctggggagactgttatacagcaagggaatgaaggagacaacttctatgtcgttgatcaaggggaagtggatgtgtacgtgaacggagagtgggtgaccaacatcagcgagggaggcagcttcggggagctggcgctcatctacggcacccccagggctgcgaccgtgaaagccaagacggacctcaagctctgggggatcgaccgggacagctaccggcgcatccttatgggcagcacgctgaggaaacgcaagatgtacgaggagttcctcagcaaggtctccatcctagagtccctggagaagtgggagcgtctgaccgtggcggatcggctggagcccgtccagtttgaagatggagagaaaattgtggtccagggagagcctggggacgacttttacatcatcacggagggcaccgcgtccgtgctgcagcgccggtcccccaatgaggagtacgtggaggtggggcgcctgggaccctctgactacttcggggagattgcactgctgctgaaccggccccgggcggccactgtcgtggcccgggggcccctcaagtgtgtgaagctggaccggccccgcttcgagcgtgtgctggggccctgctctgagatcctcaagaggaacattcagcgttacaacagcttcatctccctcaccgtctgagcacacgtcccgccctgcagccccagctccccagtgtggtggccgtgcctgctcgtctgtgtcgggggcccgggagccgctgtgtgaggtgtgggccgggtggggctgggtcccggcagcgtgaggactgccccttccccggactcactttttggaataaatgatcaccttgtgcatttccaaatcaaaggacaagcggacaaaatgcatcccaagatcaaggaagggacaggccagcttcctccccacacgcctccccggctgcctctgtgggcttctcctggggggcccaccccacccctgccagtctcctggagatgcttgaggatcggtcctccccagaaccaggccaggacgttgcccctggcggctggtgaccctgtgaggtcaggtcccccagattgaggtctgagtgtgggcaagtgtgtcaaaaggggctgccccccaggagatgaggctgagagcagggagttgaggccgaagaagtcaaggcccctcccgcaaatgtgtacccctgcccgcgccactgcaccccgccgcacccccacctccccgggggccctgctgcggatcgcggagtgggagagtctctgagctatgagattgatcttgcccctaattggagaggaagccgggcgccaagacacacggggctcctgccttgggagccagggccgcggccgcaggtagaccccagtagggggggccgggctcgaagttcctttgggaggggctggcgggactccagcaggccgtcctcacctttcttagaaagtccacccagggcaagttgatgttgggggaaagcagaagtcaagccagccgcggccccacacgccccgacccgctcaaccgacttgtcccttaaatgtgtcttggatcccgcagtgatgacgtgagccagccaggcccgaaagggtgaggccagtgcagagaagcttcccaggggattcctggttcccccgaaagacaagcgaggtcattgcagttcacccgatgttgctcctgtcccgtgcgtcccggggaggctgtccttggtccgcatggctcgttgcagcccctcccctgctggcggttacgatgcgtggggtccccctccccacccagccccggcaccgtcgccgtgtcccgcctgtgcctgtgacgtccctgtggacctgtgagccatcccccccttatctctgctctgaatactgcatgaagcattaaacgtgcaatgaag

SEQ ID NO: 99 - DNA, 1635 bp, Homo sapiens
ctcccgtagtcgtagttcccgtagtatggcggcccctgccgccgccaccgccatgggcaacgcccccgccaagaaggacaccgagcaggaggagagcgtgaacgagttcctagccaaagccagaggagatttcctctacagatggggaaaccccgctcaaaacaccgccagctcggatcagttcgaacggctcaggacgctgggcatgggctccttcgggcgggtgatgctggtgaggcaccaggagaccggcggccactacgccatgaagatcctcaacaagcagaaggtggtgaagatgaagcaggtcgagcacatactgaacgagaagcgcatcctgcaggcgatcgactttccgttcctcgtcaagctccagttctcctttaaggacaactcctacctgtacctggtgatggagtacgtgccgggtggggagatgttctcccgcctacagcgcgtcggaaggtttagcgagccccatgcctgtttctatgccgcccaggtcgtcctggccgtccagtacctacactcgctcgacctcatccaccgcgacctgaagcccgagaatctcctcatcgaccagcagggctacctgcaggtgacggacttcggtttcgccaagcgcgtgaagggccgcacttggaccttgtgcgggaccccagagtacctggcccccgagatcatcctgagcaaaggctacaacaaggccgtggactggtgggccctaggggtgctcatctatgagatggccgtgggcttcccacccttctacgccgaccagcccatccagatctacgagaagatcgtctctgggagggtgcggtttccctccaaactcagctctgacctcaaggatctgctgcggagcctgctgcaggtggacctcaccaagcgcttcggaaacctcaggaacggggttggcgacatcaagaaccacaagtggttcgccacaaccagctggatcgccatctatgagaagaaggtggaagctcccttcatcccgaagtacacaggccctggggatgccagtaactttgacgactacgaggaggaagagctccggatctccatcaatgagaagtgtgccaaggagttttctgagttttaggggtgtgcttgtgcccctgtggttttctttcctttttgtttttggtggtttgggggatgggagggttggattgaacagccagagggccccagagttccttgtatctaatttcatcctcacccacctccagggttgggggagcaggaagcccagatatttggaggaacagaaacaccagctgctccctcacccccccccatgccttcctggtccctctgtgcttctctctttctcctccacaggtcccccttgccccagcccccttctgcctgttttaaacgagtttctcagctctattcaggccaggtcttgctgttgtatcaagggacacggtgtggaaagaggggctcaaacttaactccagccctgaacaggcaccacttactaagagaggatgaatgaaaagcacacctaccctttggcgtaatcctgcctgggaaggagagaggtttagtgccatgttcagtgggctgtttgctagaataaaaaattaaaacaaaaaacaattaaaatcttatttaagttcc

SEQ ID NO: 100 - DNA, 3048 bp, Homo sapiens
cgccggcggggaagatgaccgcgggcgccggcgtgctccttctgctgctctcgctctccggcgcgctccgggcccataatgaggatcttacaactagagagacctgcaaggctgggttctctgaagatgattacacggcattaatctcccaaaatattctagaaggggaaaagctacttcaagtcaagttcagcagctgtgtggggaccaaggggacacaatatgagaccaacagcatggacttcaaagttggggcagatgggacagtcttcgccacccgggagctgcaggtcccctccgagcaggtggcgttcacggtgactgcatgggacagccagacagcagagaaatgggacgccgtggtgcggttgctggtggcccagacctcgtccccgcactctggacacaagccgcagaaaggaaagaaggtcgtggctctggacccctctccgcctccgaaggacaccctgctgccgtggccccagcaccagaacgccaacgggctgaggcggcgcaaacgggactgggtcatcccacccatcaacgtgcccgagaactcgcgcgggcccttcccgcagcagctcgtgaggatccggtccgacaaagacaatgacatccccatccggtacagcatcacgggagtgggtgccgaccagccccccatggaggtcttcagcattaactccatgtccggccggatgtacgtcacaaggcccatggaccgggaggagcacgcctcttaccacctccgagcccacgctgtggacatgaatggcaacaaggtggagaaccccatcgacctgtacatctacgtcatcgacatgaatgacaaccaccctgagttcatcaaccaggtctacaactgctccgtggacgagggctccaagccaggcacctacgtgatgaccatcacggccaacgatgctgacgacagcaccacggccaacgggatggtgcggtaccggatcgtgacccagaccccacagagcccgtcccagaatatgttcaccatcaacagcgagactggagatatcgtcacagtggcggctggctgggaccgagagaaagttcagcagtacacagtcatcgttcaggccacagatatggaaggaaatctcaactatggcctctcaaacacagccacagccatcatcacggtgacagatgtgaatgacaacccgtcagaatttaccgccagcacgtttgcaggggaggtccccgaaaacagcgtggagaccgtggtcgcaaacctcacggtgatggaccgagatcagccccactctccaaactggaatgccgtttaccgcatcatcagtggggatccatccgggcacttcagcgtccgcacagaccccgtaaccaacgagggcatggtcaccgtggtgaaggcagtcgactacgagctcaacagagctttcatgctgacagtgatggtgtccaaccaggcgcccctggccagcggaatccagatgtccttccagtccacggcaggggtgaccatctccatcatggacatcaacgaggctccctacttcccctcaaaccacaagctgatccgcctggaggagggcgtgccccccggcaccgtgctgaccacgttttcagctgtggaccctgaccggttcatgcagcaggctgtgagatactcaaagctgtcagacccagcgagctggctgcacatcaatgccaccaacggccagatcaccacggtggcagtgctggaccgtgagtccctctacaccaaaaacaacgtctacgaggccaccttcctggcagctgacaatgggatacccccggccagcggcaccgggaccctccagatctatctcattgacatcaacgacaacgcccctgagctgctgcccaaggaggcgcagatctgcgagaggcccaacctgaacgccatcaacatcacggcggccgacgctgacgtgcaccccaacatcggcccctacgtcttcgagctgccctttgtcccggcggccgtgcggaagaactggaccatcacccgcctgaacggtgactatgcccaactcagcttgcgcatcctgtacctggaggccgggatgtatgacgtccccatcatcgtcacagactctggaaaccctcccctgtccaacacgtccatcatcaaagtcaaggtgtgcccatgtgatgacaacggggactgcaccaccattggcgcagtggcagcggctggtctgggcaccggtgccatcgtggccatcctcatctgcatcctcatcctgctgaccatggtcctgctgtttgtcatgtggatgaagcggcgagagaaggagcgccacacgaagcagctgctcattgaccccgaggacgacgtccgcgaaaagatcctcaagtatgacgaggaaggcggtggcgaggaggaccaggactacgacctcagccagctgcagcagccggaagccatggggcacgtgccaagcaaagcccctggcgtgcgtcgcgtggatgagcggccggtgggccctgagccccagtacccgatcaggcccatggtgccgcacccaggcgacatcggtgacttcatcaatgagggactccgcgctgctgacaacgaccccacggcacccccctatgactccctgctggtcttcgactacgaggggagcggctccaccgcaggctccgtcagctccctgaactcatccagttccggggaccaagactacgattacctcaacgactggggccccagattcaagaagctggcggacatgtatggaggtggtgaagaggattgactgacctcgcatcttcggaccgaagtgagagccgtgctcggacgccggaggagcaggactgagcagaggcggccggtcttcccgactccctgcggctgtgtccttagtgctgttaggaggccccccaatccccacgttgagctgtctagcatgagcacccacccccacagcgccctgcacccggccgctgcccagcaccgcgctggctggcactgaaggacagcaagaggcactctgtcttcacttgaatttcctagaacagaagcactgtttttaaaaaaag

SEQ ID NO: 101 - DNA, 1968 bp, Homo sapiens
cgtgcaggacaaacgggagcggaagagagggcttcaagatgggctgcgctccagttccaacagccgcagcggagccgggagcgcagaggaacagaccgacacctcggacggggagtctgtgacccatcatatccgcaggcttaaccagcagccttctcaggggcctgggtccacgaggctacgacccaaatcgataccgactgcattttgagagagacagcagggaggaggtagagaggagaaagagagcagcccgggagcaagttctacagccgttcagtgctgagttgttggagctggacatccgggaggtgtatcagcctggctcagttctggactttcctcgacgtctccttggagctatgagatgtccaaggagcaactaatgagccaagaggaacgagcttccaagactatcttgggaagattcatggggcttactcctctgagaaactcagctacttgagcacaatctggagacatggaggcagctgtggcggtgttagagatgtctgacatcgtcctgcttatcactgatatccgacatccagttgtgaatttcccgccagcactttatgagtatgtgactggagaacttggactggccctggtgctggttttgaacaaggtggatctggccccgcgacgtcttgtggttgcctggaagcattatttccatcaacactatccccagctccacgtcgtccttttcacctcttttcctcgggacccccgcaccccacaggatcctagtagtgtcttgaagaagagtcggaggcgggggagaggatggactcgggccctggggccagagcagttgctgagagcctgtgaagccatcactgtggggaaagtggacttgagcagctggcgggagaagattgctcgggatgctggggccacctggggtaatggctctggggaggaggaggaagaggaggatggcccagcagtcctggtggagcagcagcagactgattcagcaatggagccaactggcccaacccaagagcgctacaaggatggggtggtgaccatcggctgtgtgggtttccctaatgtgggaaagtcctcgctgatcaatgggctggtggggcggaaagtcgtgagtgtctccagaaccccgggccatacccgatactttcagacctactttcttaccccctctgtgaagctctgtgactgcccaggcctcatcttcccatctcttctgcctaggcagttgcaggttctggcggggatctaccctatcgcccagatccaggagccctacactgctgtgggctacctggcctcccgaattcccgtgcaggccctgctccacctgcgccacccagaggctgaggacccctcagcggaacacccctggtgtgcctgggacatctgtgaagcctgggcagagaaacgtggttacaagacagccaaggcggctcggaatgatgtgtacagagcagccaacagtctcttgcggctggcagtggacggccgcgtcagcctgtgttttcatcccccaggctacagtgaacagaaaggcacctgggagtcccatccagagaccacggagctggtggttttgcagggcagggtggggccagcaggtgacgaggaggaggaggaagaggaagagctgagcagctcctgtgaggaggagggagaggaggaccgggatgcggatgaggagggagaaggggatgaggagaccccaacctcggctccagggtccagcctggctggccgaaacccttatgccctgctgggtgaggatgagtgctgagttccgcccagcgcctacttccctcccagatactttcgttttggactgacctgggggtatctcccctctgccaccccaattgtgaataaagattgtttgctttgtagccccttccccagatgaactgaggtgagagcggctgttccaggctaacagctgtgggaggcttctctcctcttctcccttcttttttt

SEQ ID NO: 102 - DNA, 1157 bp, Homo sapiens
ctggtgtttatccgtcactcgccgaggttccttgggtcatggtgccagcctgactgagaagaggacgctcccgggagacgaatgaggaaccacctcctcctactgttcaagtacaggggcctggtccgcaaagggaagaaaagcaaaagacgaaaatggctaaattcgtgatccgcccagccactgccgccgactgcagtgacatactgcggctgatcaaggagctggctaaatatgaatacatggaagaacaagtaatcttaactgaaaaagatctgctagaagatggttttggagagcaccccttttaccactgcctggttgcagaagtgccgaaagagcactggactccggaaggttacagtctctagcttcgccatgtacatggcccttccgtgtacatggatgggcggggaggtaactaaaagatcctttacacaataaagtagatgatcatgataaatgaggacacagcattgttggttttgccatgtactattttacctatgacccgtggattggcaagttattgtatcttgaggacttcttcgtgatgagtgattatagaggctttggcataggatcagaaattctgaagaatctaagccaggttgcaatgaggtgtcgctgcagcagcatgcacttcttggtagcagaatggaatgaaccatccatcaacttctataaaagaagaggtgcttctgatctgtccagtgaagagggttggagactgttcaagatcgacaaggagtacttgctaaaaatggcaacagaggagtgaggagtgctgctgtagatgacaacctccattctattttagaataaattcccaacttctcttgctttctatgctgtttgtagtgaaataatagaatgagcacccattccaaagctttattaccagtggcgttgttgcatgtttgaaatgaggtctgtttaaagtggcaatctcagatgcagtttggagagtcagatctttctccttgaatatctttcgataaacaacaaggtggtgtgatcttaatatatttgaaaaaaacttcattctcgtgagtcatttaaatgtgtacaatgtacacactggtacttagagtttctgtttgattcttttttaataaactactctttgatttaaaaaaaaaaaaaaaaaaaaaaaa

SEQ ID NO: 103 - DNA, 597 bp, Homo sapiens
agctgaagttgaggatctcttactctctaagccacggaattaacccgagcaggcatggaggcctctgctctcacctcatcagcagtgaccagtgtggccaaagtggtcagggtggcctctggctctgccgtagttttgcccctggccaggattgctacagttgtgattggaggagttgtggccatggcggctgtgcccatggtgctcagtgccatgggcttcactgcggcgggaatcgcctcgtcctccatagcagccaagatgatgtccgcggcggccattgccaatgggggtggagttgcctcgggcagccttgtgggtactctgcagtcactgggagcaactggactctccggattgaccaagttcatcctgggctccattgggtctgccattgcggctgtcattgcgaggttctactagctccctgcccctcgccctgcagagaagagaaccatgccaggggagaaggcacccagccatcctgacccagcgaggagccaactatcccaaatatacctgggtgaaatataccaaattctgcatctccagaggaaaataagaaataaagatgaattgttgcaactcttaaaaaaa

SEQ ID NO: 104 - DNA, 638 bp, Homo sapiens
agacctgtacagtttttattacataaaatatcacaaaattcacaagtacaacactgcttattttcttgcttgaagatcagatctctggtttatttaatatcaacattcaccacagctgaaggaaattaaactgaacctttaaaaggtaccgcatacggacctggttggggttatatacaatatattcattgtagttgagggtataaccatctggattcagaattcctgtgtcacttgctggtcctaatggcactgtactcccattcctgccaaatggaaaaaaagtgtgtcaacatcagtctctggttcagaagctgcaatagagaacgtagtcttatctggccaaaaggagtcttctagtcctcctggttctgagtacttacagggtgacgaagtgggcagaactgggaagccatcttgcccagccccttggtgctatgtttaccttgaagcaatccttcggccttaggattggcctctagtagttcattacactgacctagagctacctctgataagagcagcagtcctgtaattcttaggcaggaggcagagcagtaaatggcactcttggaagacatgtcagcaaagtagattcccttccccaacaatgtaactgtgatgggagcttcaagtgg

SEQ ID NO: 105 - DNA, 5942 bp, Homo sapiens
ccgggtccttctccgagagccgggcgggcacgcgtcattgtgttacctgcggccggcccgcgagctaggctggttttttttttttctcccctccctcccccctttttccatgcagctgatctaaaagggaataaaaggctgcgcataatcataataataaaagaaggggagcgcgagagaaggaaagaaagccgggaggtggaagaggagggggagcgtctcaaagaagcgatcagaataataaaaggaggccgggctctttgccttctggaacgggccgctcttgaaagggcttttgaaaagtggtgttgttttccagtcgtgcatgctccaatcggcggagtatattagagccgggacgcggcggccgcaggggcagcggcgacggcagcaccggcggcagcaccagcgcgaacagcagcggcggcgtcccgagtgcccgcggcgcgcggcgcagcgatgcgttccccacggacgcgcggccggtccgggcgccccctaagcctcctgctcgccctgctctgtgccctgcgagccaaggtgtgtggggcctcgggtcagttcgagttggagatcctgtccatgcagaacgtgaacggggagctgcagaacgggaactgctgcggcggcgcccggaacccgggagaccgcaagtgcacccgcgacgagtgtgacacatacttcaaagtgtgcctcaaggagtatcagtcccgcgtcacggccggggggccctgcagcttcggctcagggtccacgcctgtcatcgggggcaacaccttcaacctcaaggccagccgcggcaacgaccgcaaccgcatcgtgctgcctttcagtttcgcctggccgaggtcctatacgttgcttgtggaggcgtgggattccagtaatgacaccgttcaacctgacagtattattgaaaaggcttctcactcgggcatgatcaaccccagccggcagtggcagacgctgaagcagaacacgggcgttgcccactttgagtatcagatccgcgtgacctgtgatgactactactatggctttggctgcaataagttctgccgccccagagatgacttctttggacactatgcctgtgaccagaatggcaacaaaacttgcatggaaggctggatgggccgcgaatgtaacagagctatttgccgacaaggctgcagtcctaagcatgggtcttgcaaactcccaggtgactgcaggtgccagtacggctggcaaggcctgtactgtgataagtgcatcccacacccgggatgcgtccacggcatctgtaatgagccctggcagtgcctctgtgagaccaactggggcggccagctctgtgacaaagatctcaattactgtgggactcatcagccgtgtctcaacgggggaacttgtagcaacacaggccctgacaaatatcagtgttcctgccctgaggggtattcaggacccaactgtgaaattgctgagcacgcctgcctctctgatccctgtcacaacagaggcagctgtaaggagacctccctgggctttgagtgtgagtgttccccaggctggaccggccccacatgctctacaaacattgatgactgttctcctaataactgttcccacgggggcacctgccaggacctggttaacggatttaagtgtgtgtgccccccacagtggactgggaaaacgtgccagttagatgcaaatgaatgtgaggccaaaccttgtgtaaacgccaaatcctgtaagaatctcattgccagctactactgcgactgtcttcccggctggatgggtcagaattgtgacataaatattaatgactgccttggccagtgtcagaatgacgcctcctgtcgggatttggttaatggttatcgctgtatctgtccacctggctatgcaggcgatcactgtgagagagacatcgatgaatgtgccagcaacccctgtttggatgggggtcactgtcagaatgaaatcaacagattccagtgtctgtgtcccactggtttctctggaaacctctgtcagctggacatcgattattgtgagcctaatccctgccagaacggtgcccagtgctacaaccgtgccagtgactatttctgcaagtgccccgaggactatgagggcaagaactgctcacacctgaaagaccactgccgcacgaccccctgtgaagtgattgacagctgcacagtggccatggcttccaacgacacacctgaaggggtgcggtatatttcctccaacgtctgtggtcctcacgggaagtgcaagagtcagtcgggaggcaaattcacctgtgactgtaacaaaggcttcacgggaacatactgccatgaaaatattaatgactgtgagagcaacccttgtagaaacggtggcacttgcatcgatggtgtcaactcctacaagtgcatctgtagtgacggctgggagggggcctactgtgaaaccaatattaatgactgcagccagaacccctgccacaatgggggcacgtgtcgcgacctggtcaatgacttctactgtgactgtaaaaatgggtggaaaggaaagacctgccactcacgtgacagtcagtgtgatgaggccacgtgcaacaacggtggcacctgctatgatgagggggatgcttttaagtgcatgtgtcctggcggctgggaaggaacaacctgtaacatagcccgaaacagtagctgcctgcccaacccctgccataatgggggcacatgtgtggtcaacggcgagtcctttacgtgcgtctgcaaggaaggctgggaggggcccatctgtgctcagaataccaatgactgcagccctcatccctgttacaacagcggcacctgtgtggatggagacaactggtaccggtgcgaatgtgccccgggttttgctgggcccgactgcagaataaacatcaatgaatgccagtcttcaccttgtgcctttggagcgacctgtgtggatgagatcaatggctaccggtgtgtctgccctccagggcacagtggtgccaagtgccaggaagtttcagggagaccttgcatcaccatggggagtgtgataccagatggggccaaatgggatgatgactgtaatacctgccagtgcctgaatggacggatcgcctgctcaaaggtctggtgtggccctcgaccttgcctgctccacaaagggcacagcgagtgccccagcgggcagagctgcatccccatcctggacgaccagtgcttcgtccacccctgcactggtgtgggcgagtgtcggtcttccagtctccagccggtgaagacaaagtgcacctctgactcctattaccaggataactgtgcgaacatcacatttacctttaacaaggagatgatgtcaccaggtcttactacggagcacatttgcagtgaattgaggaatttgaatattttgaagaatgtttccgctgaatattcaatctacatcgcttgcgagccttccccttcagcgaacaatgaaatacatgtggccatttctgctgaagatatacgggatgatgggaacccgatcaaggaaatcactgacaaaataattgatcttgttagtaaacgtgatggaaacagctcgctgattgctgccgttgcagaagtaagagttcagaggcggcctctgaagaacagaacagatttccttgttcccttgctgagctctgtcttaactgtggcttggatctgttgcttggtgacggccttctactggtgcctgcggaagcggcggaagccgggcagccacacacactcagcctctgaggacaacaccaccaacaacgtgcgggagcagctgaaccagatcaaaaaccccattgagaaacatggggccaacacggtccccatcaaggattacgagaacaagaactccaaaatgtctaaaataaggacacacaattctgaagtagaagaggacgacatggacaaacaccagcagaaagcccggtttgccaagcagccggcgtatacgctggtagacagagaagagaagccccccaacggcacgccgacaaaacacccaaactggacaaacaaacaggacaacagagacttggaaagtgcccagagcttaaaccgaatggagtacatcgtatagcagaccgcgggcactgccgccgctaggtagagtctgagggcttgtagttctttaaactgtcgtgtcatactcgagtctgaggccgttgctgacttagaatccctgtgttaatttaagttttgacaagctggcttacactggcaatggtagtttctgtggttggctgggaaatcgagtgccgcatctcacagctatgcaaaaagctagtcaacagtaccctggttgtgtgtccccttgcagccgacacggtctcggatcaggctcccaggagcctgcccagccccctggtctttgagctcccacttctgccagatgtcctaatggtgatgcagtcttagatcatagttttatttatatttattgactcttgagttgtttttgtatattggttttatgatgacgtacaagtagttctgtatttgaaagtgcctttgcagctcagaaccacagcaacgatcacaaatgactttattatttatttttttaattgtatttttgttgttgggggaggggagactttgatgtcagcagttgctggtaaaatgaagaatttaaagaaaaaaatgtcaaaagtagaactttgtatagttatgtaaataattcttttttattaatcactgtgtatatttgatttattaacttaataatcaagagccttaaaacatcattcctttttatttatatgtatgtgtttagaattgaaggtttttgatagcattgtaagcgtatggctttatttttttgaactcttctcattacttgttgcctataagccaaaattaaggtgtttgaaaatagtttattttaaaacaataggatgggcttctgtgcccagaatactgatggaattttttttgtacgacgtcagatgtttaaaacaccttctatagcatcacttaaaacacgttttaaggactgactgaggcagtttgaggattagtttagaacaggtttttttgtttgtttgttttttgtttttctgctttagacttgaaaagagacaggcaggtgatctgctgcagagcagtaagggaacaagttgagctatgacttaacatagccaaaatgtgagtggttgaatatgattaaaaatatcaaattaattgtgtgaacttggaagcacaccaatctgactttgtaaattctgatttcttttcaccattcgtacataatactgaaccacttgtagatttgattttttttttaatctactgcatttagggagtattctaataagctagttgaatacttgaaccataaaatgtccagtaagatcactgtttagatttgccatagagtacactgcctgccttaagtgaggaaatcaaagtgctattacgaagttcaagatcaaaaaggcttataaaacagagtaatcttgttggttcaccattgagaccgtgaagatactttgtattgtcctattagtgttatatgaacatacaaatgcatctttgatgtgttgttcttggcaataaattttgaaaagtaatatttattaaatttttttgtatgaaaacatggaacagtgtggctcttctgagcttacgtagttctaccggctttgccgtgtgcttctgccaccctgctgagtctgttctggtaatcggggtataataggctctgcctgacagagggatggaggaagaactgaaaggcttttcaaccacaaaactcatctggagttctcaaagacctggggctgctgtgaagctggaactgcgggagccccatctaggggagccttgattcccttgttattcaacagcaagtgtgaatactgcttgaataaacaccactggattaatggaaaaaaaaaaaaaaaa

SEQ ID NO: 106 - DNA, 1446 bp, Homo sapiens
ctgccatttaggacaagctggatgatgatggtttgatagctccaggggttcgtgtataggagatgatgaatctgcttcatccagaatcacaatcttaaaaggcgggaactgaggcgactgtggggacatcagtgatcgtaagtctcctgggcccgttattctcagattaggtgacggagctaagacttcgagaccatctcgtcctttttgtatcgcggaaacctgaggaacgagccggcggcggtgacctgcacgagaagccaggctaactgggtgaagtaccatgcaagcatttcttaaaggtacatccatcagtactaaacccccgctgaccaaggatcgaggagtagctgccagtgcgggaagtagcggagagaacaagaaagccaaacccgttccctgggtggaaaaatatcgcccaaaatgtgtggatgaagttgctttccaggaagaagtggttgcagtgctgaaaaaatctttagaaggagcagatcttcctaatctcttgttttacggaccacctggaactggaaaaacatccactattttggcagcagctagagaactctttgggcctgaacttttccgattaagagttcttgagttaaatgcatctgatgaacgtggaatacaagtagttcgagagaaagtgaaaaattttgctcaattaactgtgtcaggaagtcgctcagatgggaagccgtgtccgccttttaagattgtgattctggatgaagcagattctatgacctcagctgctcaggcagctttaagacgtaccatggagaaggagtcgaaaaccacccgattctgtcttatctgtaactatgtcagtcgaataattgaacccctgacctctagatgttcaaaattccgcttcaagcctctgtcagataaaattcaacagcagcgattactagacattgccaagaaggaaaatgtcaaaattagtgatgagggaatagcttatcttgttaaagtgtcagaaggagacttaagaaaagccattacatttcttcaaagcgctactcgattaacaggtggaaaggagatcacagagaaagtgattacagacattgctggggtaataccagctgagaaaattgatggagtatttgctgcctgtcagagtggctcttttgacaaactagaagctgtggtcaaggatttaatagatgagggtcatgcagcaactcagctcgtcaatcaactccatgatgtggttgtagaaaataacttatctgataaacagaagtctattatcacagaaaaacttgccgaagttgacaaatgcctagcagatggtgctgatgaacatttgcaactcatcagcctttgtgcaactgtgatgcagcagttatctcagaattgttaacgtgatatatctggatggggggttttgtaaataatgaagttgtaataaaaataaaatgaccaaaagcaccg

SEQ ID NO: 107 - DNA, 733 bp, Homo sapiens
  misc_feature (511)..(511): n is a, c, g, or t
  misc_feature (591)..(591): n is a, c, g, or t
  misc_feature (641)..(641): n is a, c, g, or t
  misc_feature (668)..(668): n is a, c, g, or t
aagagacagggtctcactctgttgctcaggctggagtgtagtggcgcgatcatagctcgctgcagcctcaaactcctgggctccagtgatcctcccctcagcctcctgagtacaggtgcacgtcactgcagccagccagtctgacatcttgattccagggtggaaaacccttcttgtctccatggtaatggctgggctctcccaccctccaatagttcagctgccaagctcaagtccagtggaatttatcaacaatttatcaccctgcccctgctctgctagacaatttcatgccttctcctttatccccatgctcctgagactgagcctttccaggagcccctcaacctgcttcctcccagaatccgggcaaggctacactggtttcccctctgcagggccctggccctgggagggggaaggctgactctaatggggaggaatcccagcttcagtggcttcaaggcaggccattcaacttaccgaccttggctacacacacccatgacancgcacacagacgcagacacaagactgggcacttggatcacactggccatgtaccaaagtggcaggggcagcccgtttggngcccccagaattgaggttggggagtagtggggggagaccaccctttctgngggaaggaagagtctaggctgaggtangagtagaagatggctacaggactagtcatctctagtttctgaaattcctgaaagggagatgtgtg

SEQ ID NO: 108 - DNA, 4148 bp, Homo sapiens
gacctccatcctgcgcaagcaggctgaggaggaggccatcaagcgctcacgctcactctccgagagctatgagctctcctcggacctgcaggacaagtaggtggagatgctagaacgaaagtatggggggcgcctggtaacccgccatgcggcccgcaccatccagacggcgtttcgccagtaccagatgaacaagaacttcgagcgcttgcgcagctccatgtcagagaaccgcatgtcacgccggattgtgctgtccaacatgaggatgcagttctcctttgaggggcctgagaaagtgcacagctcctacttcgaggggaagcaggtctcagtgactaacgacggctcccagctgggagccctggtgtcccctgagtgtggtgacctcagcgagcccaccaccctcaagtctccggccccctccagtgactttgcggacgccatcaccgagctggaggacgccttctctaggcaagtgaaatcactggccgagtccatcgacgatgccctcaactgccgcagcctgcacactgaggaggcaccggccctggatgcggcgcgggcccgggacaccgaaccccagacagccctgcacggcatggaccaccgcaaactggacgagatgacggcctcgtacagtgatgtcaccctgtacatcgatgaggaggagctgtcgccccctctgcccctctcgcaggcaggggaccggccgtccagcaccgagtcggacctgcggctacgggctgggggcgcagccccagactactgggccctggcccacaaagaggacaaggctgacacggacacgagctgccggagcacgccgtcgctggagcggcaggagcagcggctgcgggtggagcatctgccgctgctcaccatcgagccacccagcgacagctctgtggaccttagtgaccgctcggagcgggggtcactcaagaggcagagtgcttacgagcgcagccttggcgggcagcagggcagtcccaagcatggtccccacagcggcgcccccaagagcctcccccgggaggagcctgagttgcggccccggccccccaggcccctggacagccacttggccatcaatggctcagccaaccggcagagcaagtctgagtcggactactcagacggtgacaatgacagcatcaacagcacgtccaactccaacgataccatcaactgcagctccgagtcatcgtcccgtgacagcctgcgggagcagacgctcagcaagcagacctaccacaaggaggcccgcaacagctgggactcgcctgcctttagcaacgatgtcatccgcaagaggcactaccgcatcggcctgaacctcttcaacaagaagcctgagaagggagtccagtacctcatcgagcgtggctttgtgcccgacacgcccgtcggggtggcccacttcctgctgcagcgcaagggcctcagccggcagatgatcggcgagttcctgggcaaccggcagaagcagttcaaccgtgacgtgctcgactgcgtcgtggacgagatggacttctctaccatggagctggatgaggccctcaggaaattccaggcgcacatccgtgtccaaggggaggctcagaaagtggagcggctcatagaggcgttcagccagcgctactgcatctgcaaccctggggtggtgcggcaattccggaacccagacaccattttcatcctggccttcgccatcatcctgctgaacaccgacatgtacagccccaatgtcaagcccgagcggaaaatgaagctagaggacttcatcaagaacctccgaggtgtggacgatggtgaggacattccccgtgagatgctgatggggatctatgaacggatccgtaagcgagagctaaagaccaatgaggaccatgtgtcccaggtgcagaaggtggagaagctcattgtggggaaaaagccgatcggatccctgcatcccgggctcggctgtgtgctctctctgccccaccgtcggttggtctgctactgccggctctttgaggttccagacccaaacaagccccagaaactcggactacaccagcgagaaatcttcctgttcaacgacctcctggtggtcaccaagatcttccagaagaagaagaactcggtgacgtacagcttccgacagtccttctccttgtacggcatgcaggtcctgctcttcgagaaccagtactaccccaatggcatccggctcacctcgtctgtccccggagcagatatcaaagtgttaataaacttcaacgcccccaaccctcaagaccggaagaaattcaccgatgacctgcgggagtccattgcggaagtccaagagatggagaagcacaggatagagtcggagctcgagaagcagaaaggcgtcgtgcggcccagcatgtcccagtgctctagcctcaaaaaggagtcgggcaacggaacactgagccgggcctgcctggacgacagctatgccagcggtgagggcctcaagcgcagcgccctcagcagctccctgcgggacctctcggaagccgggaagcgagggcgtcgcagcagtgcgggatcgctagagagcaatgtggaatttcagcctttcgagccactgcagccgtcagtgctgtgctcctaagccatgggacccgaggactgccccccggcgcctgcccaggcggaggccctttcagaaagggcgaagctcacgcctgactctgcgggccgcggggccgcgttcccagtggacagcgtggtgagccgtggccggacggcaggaggagaggggagccccctctggctgtgtgtcaccttggctggctggctggccagggttttgccgatttccctcctcacatccctcccaccctcggtcatatcattgagatcaccgtaccagcaaatctgcaaaccaagcactttgttaatctccagagagagcaaatacagcaatctagagtttagcctttttaaaaatgtgactttaacccgcccacctgtgtcctcccattggcgtggcatttctttggtgtctgctcagaaagaaacagcatgggaccgtgtgattgggtccaggctgggctgtcagggaagcgccctggtgtctccgactcatcaattctcgggttttttttaaaagccaggctccccaaagcactctttgtctcgcaattttgaggaggttgttccgacctggaagcgttaaactgctgcatgtcatctggcgtcagctgtgaggctgcgctctgcgtgttgtgcgtttgcaaaatgtattggcgtgactgtaaacacatcgttgaagtaaagcgattacatattgagtatgtcagcttttctcaccctcttctgtgctgggaggagagtctaactgtaacctttaggttgttccagaaaagattcaggccgtttggcacagaattgctctttctgaagggtagcagtaatgaataggaacagacagaaaaccccaggaggggctttcaggaaactctccctctccatcgccatcctgcaagctccacagcctcgggctgccagcctgtggcactgtcctcggtgtgtcctggagctgtgctgggcagcagggcctcgcgtaaggaactgctggaacccactgagcccttcccggggtttcccgccgcacttagtgtgttccttcaggctagtgaggtttcattctgtttatttgcaagcttatcaaaagtttgtggaagatacattgttgggttccagaggctggagtcatgctgcccacatcttgtttgggaaagcaaaagctcccagtgagctggtgtccccgtgtgtctttcatgggactgtcccctttagagatcccacctgtcagagccacagcttcggggtcctgtcatcacatcccctgggaggggaggcaggaggaggccgagggccccaggatgtctgcctggtcccttctcactgtgaggacgcccttggcacacctttctcaagtcacacaaattattgcagttacatacagaattgctgacaggagcaggagacgctgagggaaacagctggcaatgtgacaaaagtcttttctgggacaacaatcaaatcatgtatttgtatttttttaagtttaccaatgaattgtacaacaatgtaaaaataaagttcatcctaatatgctgtgc

SEQ ID NO: 109 - DNA, 584 bp, Homo sapiens
  misc_feature (262)..(262): n is a, c, g, or t
  misc_feature (574)..(574): n is a, c, g, or t
atcaaagtttttttgtgtcaatgccaaagcaacgaagaattcccctttttccttcactattgacagcttcagtttctgtacttactgtgtcatcctatccattcccttccctgagcctggactgctcttccaagggagactaggagtgaagggaggagtcctcccaaagttaccctttaagcttgataattagctccatagccatgctaaagcatgactgtagatccccaagtccctgacacattttcttctaagaaaactnttagccaagtaaagacgtaagccctgaagatggcaaaaggtgtcataatctcccaaagtcatctgtatagatgcttcatttaaccctttttcttttgcagacaaagggttaaaaatctcttctttctacctatatctttaaagagggattgacaagcccaaatttccttttatgaaaagacccaaggtttctggccaacaattcacttttttcagtctcttaggtcctcttgcatgcctgagaatattgagtattcggaatctcctaccagcctttggtaaatgaccctaccaggtggaatagtttgagctntatctgctct

SEQ ID NO: 110 - DNA, 5153 bp, Homo sapiens
gtcgacggccattatggatggatggccgagtgcctcgcagcccctcccgaggcgcagccgccagaccagtggagccggggcgcagggcgggggcggaggcgccggggcgggggatgcggggccgcggcgcagccccccggccctgagagcgaggacagcgccgcccggcccgcagccgtcgccgcttctccacctcggcccgtggagccggggcgtccgggcgtagccctcgctcgcctgggtcagggggtgcgcgtcgggggaggcagaagccatggatcccgggcagcagccgccgcctcaaccggccccccagggccaagggcagccgccttcgcagcccccgcaggggcagggcccgccgtccggacccgggcaaccggcacccgcggcgacccaggcggcgccgcaggcaccccccgccgggcatcagatcgtgcacgtccgcggggactcggagaccgacctggaggcgctcttcaacgccgtcatgaaccccaagacggccaacgtgccccagaccgtgcccatgaggctccggaagctgcccgactccttcttcaagccgccggagcccaaatcccactcccgacaggccagtactgatgcaggcactgcaggagccctgactccacagcatgttcgagctcattcctctccagcttctctgcagttgggagctgtttctcctgggacactgacccccactggagtagtctctggcccagcagctacacccacagctcagcatcttcgacagtcttcttttgagatacctgatgatgtacctctgccagcaggttgggagatggcaaagacatcttctggtcagagatacttcttaaatcacatcgatcagacaacaacatggcaggaccccaggaaggccatgctgtcccagatgaacgtcacagcccccaccagtccaccagtgcagcagaatatgatgaactcggcttcagccatgaaccagagaatcagtcagagtgctccagtgaaacagccaccacccctggctccccagagcccacagggaggcgtcatgggtggcagcaactccaaccagcagcaacagatgcgactgcagcaactgcagatggagaaggagaggctgcggctgaaacagcaagaactgcttcggcaggtgaggccacaggagttagccctgcgtagccagttaccaacactggagcaggatggtgggactcaaaatccagtgtcttctcccgggatgtctcaggaattgagaacaatgacgaccaatagctcagatcctttccttaacagtggcacctatcactctcgagatgagagtacagacagtggactaagcatgagcagctacagtgtccctcgaaccccagatgacttcctgaacagtgtggatgagatggatacaggtgatactatcaaccaaagcaccctgccctcacagcagaaccgtttcccagactaccttgaagccattcctgggacaaatgtggaccttggaacactggaaggagatggaatgaacatagaaggagaggagctgatgccaagtctgcaggaagctttgagttctgacatccttaatgacatggagtctgttttggctgccaccaagctagataaagaaagctttcttacatggttatagagccctcaggcagactgaattctaaatctgtgaaggatctaaggagacacatgcaccggaaatttccataagccagttgcagttttcaggctaatacagaaaaagatgaacaaacgtccagcaagatactttaatcctctattttgctcttccttgtccattgctgctgttaatgtattgctgacctctttcacagttggctctaaagaatcaaaagaaaaaaactttttatttcttttgctattaaaactactgttcattttgggggctgggggaagtgagcctgtttggatgatggatgccattccttttgcccagttaaatgttcaccaatcattttaactaaatactcagacttagaagtcagatgcttcatgtcacagcatttagtttgttcaacagttgtttcttcagcttcctttgtccagtggaaaaacatgatttactggtctgacaagccaaaaatgttatatctgatattaaatacttaatgctgatttgaagagatagctgaaaccaaggctgaagactgttttactttcagtattttcttttcctcctagtgctatcattagtcacataatgaccttgattttattttaggagcttataaggcatgagacaatttccatataaatatattaattattgccacatactctaatatagattttggtggataattttgtgggtgtgcattttgttctgttttgttgggttttttgttttttttgtttttggcagggtcggtgggggggttggttggttggttggttttgtcggaacctaggcaaatgaccatattagtgaatctgttaatagttgtagcttgggatggttattgtagttgttttggtaaaatcttcatttcctggttttttttaccaccttatttaaatctcgattatctgctctctcttttatatacatacacacacccaaacataacatttataatagtgtggtagtggaatgtatccttttttaggtttccctgctttccagttaatttttaaaatggtagcgctttgtatgcatttagaatacatgactagtagtttatatttcactggtagtttaaatctggttggggcagtctgcagatgtttgaagtagtttagtgttctagaaagagctattactgtggatagtgcctaggggagtgctccacgccctctgggcatacggtagatattatctgatgaattggaaaggagcaaaccagaaatggctttattttctcccttggactaatttttaagtctcgattggaaatcagtgagtaggttcataatgtgcatgacagaaataagctttatagtggtttaccttcatttagctttggaagttttctttgccttagttttggaagtaaattctagtttgtagttctcatttgtaatgaacacattaacgactagattaaaatattgccttcaagattgttcttacttacaagacttgctcctacttctatgctgaaaattgaccctggatagaatactataaggttttgagttagctggaaaagtgatcagattaataaatgtatattggtagttgaatttagcaaagaaatagagataatcatgattatacctttatttttacaggaagagatgatgtaactagagtatgtgtctacaggagtaataatggtttccaaagagtattttttaaaggaacaaaacgagcatgaattaactcttcaatataagctatgaagtaatagttggttgtgaattaaagtggcaccagctagcacctctgtgttttaagggtctttcaatgtttctagaataagcccttattttcaagggttcataacaggcataaaatctcttctcctggcaaaagctgctatgaaaagcctcagcttgggaagatagatttttttccccccaattacaaaatctaagtattttggcccttcaatttggaggagggcaaaagttggaagtaagaagttttattttaagtactttcagtgctcaaaaaaatgcaatcactgtgttgtatataatagttcataggttgatcactcataataattgactctaaggcttttattaagaaaacagcagaaagattaaatcttgaattaagtctggggggaaatggccactgcagatggagttttagagtagtaatgaaattctacctagaatgcaaaattgggtatatgaattacatagcatgttgttgggattttttttaatgtgcagaagatcaaagctacttggaaggagtgcctataatttgccagtagccacagattaagattatatcttatatatcagcagattagctttagcttagggggagggtgggaaagtttggggggggggttgtgaagatttagggggaccttgatagagaactttataaacttctttctctttaataaagacttgtcttacaccgtgctgccattaaaggcagctgttctagagtttcagtcacctaagtacacccacaaaacaatatgaatatggagatcttcctttacccctcaactttaatttgcccagttatacctcagtgttgtagcagtactgtgatacctggcacagtgctttgatcttacgatgccctctgtactgacctgaaggagacctaagagtcctttccctttttgagtttgaatcatagccttgatgtggtctcttgttttatgtccttgttcctaatgtaaaagtgcttaactgcttcttggttgtattgggtagcattgggataagattttaactgggtattcttgaattgcttttacaataaaccaattttataatctttaaatttatcaactttttacatttgtgttattttcagtcagggcttcttagatctacttatggttgatggagcacattgatttggagtttcagatcttccaaagcactatttgttgtaataacttttctaaatatagtgcctttaaaggaaaaatgaacacagggaagtgactttgctacaaataatgttgctgtgttaagtattcatattaaatacatgccttctatatggaacatggcagaaagactgaaaaataacagtaattaattgtgtaattcagaattcataccaatcagtgttgaaactcaaacattgcaaaagtgggtggcaatattcagtgcttaacacttttctagcgttggtacatctgagaaatgagtgctcaggtggattttatcctcgcaagcatgttgttataagaattgtgggtgtgcctatcataacaattgttttctgtatcttgaaaaagtattctccacattttaaatgttttatattagagaattctttaatgcacacttgtcaaatatatatatatagtaccaatgttacctttttattttttgttttagatgtaagagcatgctcatatgttaggtacttacataaattgttacattattttttcttatgtaatacctttttgtttgtttatgtggttcaaatatattctttccttaaaaaaaaaaaaaaaaaaaaaaaaaaaaaaaaaaaaaaa

SEQ ID NO: 111 - DNA, 8034 bp, Homo sapiens
cttgagtgttagagctgagtagttttcccagaatctctaagtcctttttatgctcttttatgaatgaatagaattagtaaaagataaataaattttttcttttggatttcttaaccagtggaaaaaatgttgactttaaaagttcataaaatcaaattttgcttaagaatatgttatttccacttgtgaggccagcctggtagacctctgggatccttttctgttcactcacacaccactgagataaggagtgaagtgtgggctaaatagggctgaggcttgggcaagggcatttctgccagagcaccagagacgtcagcatctcaagggcactgtggtatggaaaaggacgccacatgagtaaattttaaaaatataaatattttaaagggtaaaaatgagggtccctgtatttgaggatataaaagatgaaactgaagaagaaaagataggggaagaagaaaatgaagaagaccaggtcttctataagcctgttattgaagacttaagcatggaattggccagaaaatgcacggaactcattagcgatatccgttataaagaagagtttaaaaagtccaaggataagtgtacatttgtgactgacagtcctatgctaaaccatgtaaaaaatatcggtgcttttatttctgaggcaaaatacaaaggcaccattaaagctgacctttctaattctctttataagcggatgccagccacaattgacagtgtttttgcaggagaagttacacagctccagagtgaggtggcctacaagcagaaacatgatgctgccaaaggattctcagattatgcccacatgaaggagccccctgaggttaaacatgccatggaggtcaataaacaccagagtaatatttcttataggaaagacgtgcaggacacccacacgtacagtgcagaacttgaccgaccagacatcaagatggcaacccagatctctaagatcataagcaatgcagaatacaagaaaggacaaggaataatgaataaagagcccgctgtaattggaagaccagattttgaacatgccgtggaagcttctaaactttctagtcaaattaaatacaaagaaaaattcgataatgaaatgaaggataagaaacatcattacaatcctcttgaaagtgcttcttttaggcagaatcagcttgctgctacactggcgagcaatgtgaagtacaagaaagacattcaaaatatgcatgatccagtttcagatctcccaaatttgttgtttttagaccatgttttgaaagccagcaaaatgctcagcggccgagaatataaaaagctctttgaggaaaacaaaggaatgtatcattttgatgcagatgctgtggaacatctgcaccataaaggcaatgccgtcctccaaagtcaggtgaaatataaagaagaatatgagaaaaataagggaaagccaatgcttgaatttgttgagacaccatcatatcaagcttcaaaggaggctcaaaagatgcaaagtgaaaaagtttacaaagaggattttgagaaggagattaaaggaaggtcatcactggatttagacaagactccagaatttttacatgtaaagtacatcaccaaccttctgagggagaaagaatataaaaaagatttggaaaatgagataaaagggaaaggaatggaacttaattcagaagttcttgatatccaaagagcaaagcgggcctctgaaatggcaagtgagaaagaatacaagaaagacctggagtcaataattaaagggaaaggaatgcaagctggcactgacacccttgaaatgcagcatgccaagaaggctgcagagatagcgagtgagaaagactataaaagagatctggagactgaaattaaagggaaagggatgcaggtgagcacagacactcttgatgtccagagagctaagaaagcatccgagatggccagccagaaacaatacaagaaggacttagaaaatgaaattaaagggaaaggaatgcaagtgagcatggatatcccagatatccttcgagccaagaggacatctgaaatctatagccagagaaagtataaagatgaagcagagaagatgctttctaactattctaccatagcagatactcctgaaattcagagaattaagacaactcaacaaaacattagtgcggtattttataagaaagaagtgggagctggcactgcagtgaaagatagcccagagatcgaacgagtgaagaaaaatcagcagaatattagttcagtgaaatacaaagaagagattaaacatgcaacagccatttctgatcctccagaactaaagagagttaaagaaaaccagaagaacatcagcaatctccagtataaagagcaaaactacaaggccactccggtaagcatgaccccggagatagagagagtgaggcgaaaccaggagcagctgagtgcggtaaaatataagggagaacttcaacggggaactgcaatttctgatccaccagagctgaagagggcaaaagaaaaccagaaaaacatcagcaatgtttattacagaggtcagctgggaagagctaccactttaagtgtaactcctgaaatggaaagagtgaagaagaatcaagaaaatattagctcggtaaaatatacccaggaccataaacagatgaaaggtagaccaagtctgattttagatacacctgctatgagacatgttaaagaagcacaaaatcatatttcaatggtaaaataccatgaagattttgaaaaaacaaaggggagaggctttactcccgtcgtggacgatcctgtgacagagagagtgaggaagaacacccaggtggtcagcgatgctgcctataaaggggtccaccctcacatcgtggagatggacaggagacctggaatcattgttgacctcaaagtttggcgcacagatcctggctccatcttcgaccttgatcccctggaagacaatattcagtctagaagtctccatatgctctctgaaaaggcgagtcactataggcgacactggtctcgatcccattccagcagtactttcggtacaggtctcggagacgacaggtcagaaatctccgagatttaccctagcttttcatgctgcagtgaggtaacaagaccgtctgatgaaggagcacctgttcttcccggagcctatcagcaaagccattcccaaggctatggctacatgcaccagaccagtgtgtcatccatgagatcaatgcagcattcaccaaatctaaggacctaccgagccatgtacgattacagtgcccaggatgaagacgaggtctcctttagagacggcgactacatcgtcaacgtgcagcctattgacgatggctggatgtacggcacagtgcagagaacagggagaacaggaatgctcccagcgaattacattgagtttgttaattaattatttctccctgccctttgagctttattctaatgtatcccaaacctaatctttttaaaagatagaagatacttttaagacaacttggccattattttacaatgatgtatccttcctttgacaattagacacacaggtaccaggaagaaggaatgacctctgggctgaaaacagcagcattttcagtaattcctacaaacaaaaatctttgtgtctggacgcctggtgctgctaattgtgttcatggtttcctttgattggctattgaacccttctgggaaatgtatttttgtagactttaatagagaagttgattgtcccttaaatgtagcgtgtgtttgaaacttcttagctgtcactttggaatcaccccaagccaattctcttaactctgtaatgcagccaataatacaaacccgttttgcttttgagtcatgaggcaatttccaatattagtgaaaattgcccaatataataagtgtaaacagtggcagaaggacagtctggttaaaattatattgactggtggccttagggatctagaaacttctactaaacagagaaatttccttgttccctaggctgactggtatctatttatttctcatttgtaccaaggcatctcctactctccatttatattctatggacccaagtctatgctcagttccacagaatgtcaggaccaaataacttcacagctactctgcaaagggcaaattataatgtcattgatataatttccctagtagcatttaccctgttgcatgtcatgtagattcaagcttctgtaacataggcagctgcactgcgcgttcctattattgaagcaaaaagggtgactgatacctaaaagccctttcttcctctagtcgccagctcatcagaaaaacatactttgaaaagatgcttgagattttcctgctgcatcgcactctagtttggaaggatttacatcttaggaaataacatgtatactctagtaaataagcgatttaggtgttccattgaacagctttgattaacttaatgccaccattgatttcaaagtgaagaaaatgtaacagaagccagtgaagcaatggaagctggagtgtgactggaaaaatactcagcaaacaaagttaccaattccatacagagatgatctggtgtcttcttttggaaaatggtattcaaattctggaatggaaatctagccaccaaaacgggttaatcaaaagacgtccttttccgttttttttgcttttattttctaaatcatttttaagggaatgaaacaggaatgtcatcagagattttttagtacaggcccaagagcctgtactctaagaaagaaatttttgccatgtatgaattttcgaataagtgactttgcaggcttttgctagcccttgctggtgggtctggaaattacatccagagtctgcagtccaggtcaccaagccagcggcacccgtcggcaaccctgtgtttaacggattgtgccgtttactgtgacctgcaacggggtggcattcacttagggtctgacttcacagctatgacaaaaccgaaaaagcaaaactgcgaggaagtgctaagatgtacgggtcttggggatatctgccttatatgttatattcaaggaaattaacgaaacatcctgtgaaacatcgtttaaggaaacgtttactagtccaaaggccaaagctaatttatttccactttagaaaagttagcacatgcttttgaaaatctgtgatttcattttattaggctaaaagggtaaataggctttattacactgaagctgcatctatatgtcactgacataaagttgaaaaaataaatgcaggcaaataactagagacttcttttaagggggtttggctggtttctctcactgaaatggccagtcgtgattaaagtgataaaaccccatatctgttttggtatattgtacacaaacctacaaaaataaactgaacttgcaatatttttgcaataaaatctgtcgttaaaactgaggataaaatacctgctcaattttattttactaagtatatatttacatttcacccaggcaggccattttcttttgtgattataagaaagagtagttgttgattaaattttcagactaaatataggacaggtacaattttggataaatagcagatttataagaaccgcaatgaaaactgacttgaaataatgcttgtaatcaggaaagtaatttcatccaccgatttcaaaaccagattcactgagcataaaagtcaatacatatttgaggaataagtctcctaaaattttaagcttcacgtaataatgtttgcatagcaaaatatttctgcttcaagcctttaggaattaagatctgatcagaatttaactaaagggtagttgttttacaatgaagactaaaactgaacaagatgttgcatgcgcttaggccataatttggtagtgttggcagttgttaataaagcttgtcaggatgttaagcatctcaggagaaatattggaaaattatatgtataaaaccaaagtgctgtttttaaaagcatcatttaaaaaaaaatgacatgcctgaacaacttttccactttccacgtgcttccctcccacctttggtttggcaacaggtatctcgtgcatgaagctgacagctaaagaagattttaaaaattgagttaaagatgactgtgtaaatgtccaagcacagagagcatgcacctgactttctaaagtttgatgtgttctcaagcctgacagaagcacaaggaacagtttgatacacttttaaaaggttctgaaaacaaagctgtatagggatcctctctctcttgagcaaagtatagcaacagaatatattgcttttgttgtaagcttttgtagtacatgtttttactaataattcttgttctctagaaagctttctatttctaacctatggcaaaatgaatccttcatgtcttcttgttattgtttacacacttgcagtgtagcccagtttgaaatatttatttggttatcaactgcccatggaggaggctcttgatgatcccaggtctcctcgacctccatacaccacacaggcatttgtaagcacagtttccacaagcaccttgtaggaatatggataagattagaccagcccctctctgtccactgggtttatttcttgaagaagatgcagatctggtttttccaatgtgccacagtctttccttatcctctccatgctgagcttgacaacactctgggaatgaggaacaagactttttctaaaaagatagtggaagttcaagggatgtacctcgttttcaggttcatccatctccagtggaatgttttcaataaaagatgaagaaaatgtgtgtgatctttaataacacatccctatagaaagtggataaaagatataccaaaactgtaatacagatatatacaaatataggtgcctttttgattactcttgtttgtctagtatgctcttggaaagaaaaccaagcaagcaagttgctgcctattctatagtaatattttattacacatgattgatatttttgtggtagggaagtgggatgctcctcagatattaaaggtgttagctgattgtattttatctctaaagatttagaactttagaaaatgccgacttcttccatctatttctgaaaggttctttgtggatttatatagagttgagctatataaacattaactttagatttgggatttaaaatgcctattgtaagatagaataattgtgaggctggattcactacacaagatgaacttcacttcataaattaattataccttagcgatttgcttctgataatctaaaagtggctagattgtggttgttttggttaaggtgatatggaggtgggagagcttttagttaagtaagaagctatgtaaactgacaaggatgctaaaataaaagtctctgaagtattccatgccttttggaccctttcctcgcaactaactgtcaactgttgatcaaaaaagtcaaggcattgtatgttgcttctgtggttattattctgtgatgcttagactacttgaacccataaacttggaagaatctttgagcaaattttctcagttgtctgtatgacttcagtatattcctgggaatgccataggattttttgtgcttgatacatggtatccagtttgcatagtatcacttctttgtaatccagttgctgttaagaatgatgtactttaaaggaaaagagaaaactgcatcacagtcccattctccagtgtccatgcaatgaattgctgagcatttaggaagcagcaccaagtctattacaggcatggtgtgaaacttgatgtttgacctgtgatcaaaattgaaccattgtacagtttggcttctgtttgcttcaaaatatgtagaattgtggttgatgattaatttgcgagactaactttgagagtgtaacagttttgaagaaaacattgaatgttttacaaatgaaggggcttcacggaatgttacaatgttactaatataatttggcttttgttatgcaaattgttaacaccagctattaaaatatattttagtagaaaaaaaaaaa

SEQ ID NO: 112 - DNA, 2920 bp, Homo sapiens
tctggttcggcccacctctgaaggttccagaatcgatagtgaattcgtggagtaggtttctgtgcagcattgcagaatccacacctagagaacagaagacacagacacgtacgtctactacccttgttagaaggaagctttggatcttcggtggataacaagagtaatccacagacttaaaacatgagctcagatgccagccaaggcgtgattaccactcctcctcctcccagcatgcctcacaaagagagatattttgaccgcatcaatgaaaatgacccagaatacattagggagaggaacatgtctcctgatctacgacaagactccagcatgatggagcagaggaaacgagttactcggatcctgcaaagtcctgcctttcgggaagacttggaatgccttattcaagaacagatgaagaaaggccacaacccaactggattactagcattacagcagattgcagattacatcatggccaattctttctcgggtttttcttcacctcctctcagtcttggcatggtcacacctatcaatgaccttcctggtgcagatacatcctcatatgtgaagggagaaaaacttactcgctgtaaacttgccagcctgtacagacttgtagacttgtttggatgggcacacctggcaaatacctatatctcagtaagaataagtaaggagcaagaccacattataataattcccagaggcctatctttttctgaagctacagcctccaatttggtgaaagtcaatataataggagaagtggttgaccagggaagtaccaatttgaaaattgaccatacaggattcagtccccatgctgcaatctattcaacacgtcctgatgttaagtgtgtgatacacatccatacccttgcaacagcagctgtatcctccatgaaatgtgggatccttccaatttctcaagagtctcttcttctgggagatgttgcctattatgactaccaagggtcacttgaagaacaggaggagagaattcaactgcagaaggttctgggaccaagttgtaaagtgctggtactcaggaatcatggtgtggttgcacttggagaaacattagaggaggcttttcattatatttttaatgtgcaactagcctgtgagattcaggtgcaggccctagcaggtgcaggtggagtagacaatctccatgtactggactttcagaagtataaagctttcacttacactgtagcagcgtctggtggaggaggtgtgaatatgggttcccatcaaaaatggaaggttggcgaaattgagtttgaagggcttatgaggactctggacaacttggggtatagaacaggctatgcttacaggcatcctctcattcgagagaagcctaggcacaagagtgatgtggaaatcccagcaactgtgactgctttttcctttgaagacgatacagtgctactctctcctctcaaatacatggcacagaggcaacagcgtgaaaaaacaagatggctgaactcaccaaatacttacatgaaagtgaatgtgcctgaggagtctcggaacggagaaaccagtccccgaaccaaaatcacgtggatgaaagcagaagactcatctaaagttagtggtggaacacctatcaaaattgaagatccaaatcagtttgttcctttaaacacaaacccgaatgaggtactagaaaagagaaataagattcgggaacaaaatcgatatgacttgaaaacagcaggaccacaatctcagttgcttgctggaattgttgtggataagccaccttctactatgcaatttgaagatgatgatcatggcccaccagctcctcctaacccatttagtcatctcacagaaggagaacttgaagagtataagaggacaatcgaacgtaaacaacaaggcctagaagaaaaccatgagctgttttccaagagcttcatctccatggaagtgcctgtcatggtagtaaatggcaaggatgatatgcatgatgttgaagatgagcttgctaagcgagtgagtaggttaagcacaagtacaaccatagaaaacatcgagattactattaagtctccagagaaaatcgaagaagtcctgtcacctgaaggctccccttcaaaatcgccatccaagaaaaagaagaaattccgcactccttcttttctgaaaaagaacaaaaaaaaggagaaagttgaggcctaaataaagtctttttataattattattataacaatgtgacattgcacatctaaataccacatttaagttgatcattaatatgcaatggtagatcagattgggggatgtagcaaactggactttaagaactggaaagaggttttacaaaagaaaaactttcagattcatctctcattttatatgtccagaaatggctttgaattttaagcaattactagttttaattagctctgccctcatgaagtattattataattcaccataaacagctatctgtctgaattacttcaggccttctccataatatctgttagaaagaaattgccagtgagcaagtgagaatttttatttctcaatacctgcttcacttgataatcatattataattttttatcatgattattgactatatttttggagtcccattgtttcagtgggcattaacagaatgctttaaaaacttctaagacaagaatctatagcattagtatacactggcacataattttttaaaaagttttaagaaaagattcatttggaattttattcacagtataaaatttcctcacctgaagtaactttgtttgccaaaaaagttgttttaataaactataatttttgaaaacttccttttttattagtttagaaagccccttatttttcaacaaaggggattttgtacacataacatgggttatttagtttaactctggc

SEQ ID NO: 113 - DNA, 1804 bp, Homo sapiens
cgctccacctctcaagcagccagcgcctgcctgaatctgttctgccccctccccacccatttcaccaccaccatgacaccgggcacccagtctcctttcttcctgctgctgctcctcacagtgcttacagttgttacaggttctggtcatgcaagctctaccccaggtggagaaaaggagacttcggctacccagagaagttcagtgcccagctctactgagaagaatgctgtgagtatgaccagcagcgtactctccagccacagccccggttcaggctcctccaccactcagggacaggatgtcactctggccccggccacggaaccagcttcaggttcagctgccacctggggacaggatgtcacctcggtcccagtcaccaggccagccctgggctccaccaccccgccagcccacgatgtcacctcagccccggacaacaagccagccccgggctccaccgcccccccagcccacggtgtcacctcggccccggacaccaggccggccccgggctccaccgcccccccagcccatggtgtcacctcggccccggacaacaggcccgccttgggctccaccgcccctccagtccacaatgtcacctcggcctcaggctctgcatcaggctcagcttctactctggtgcacaacggcacctctgccagggctaccacaaccccagccagcaagagcactccattctcaattcccagccaccactctgatactcctaccacccttgccagccatagcaccaagactgatgccagtagcactcaccatagcacggtacctcctctcacctcctccaatcacagcacttctccccagttgtctactggggtctctttctttttcctgtcttttcacatttcaaacctccagtttaattcctctctggaagatcccagcaccgactactaccaagagctgcagagagacatttctgaaatgtttttgcagatttataaacaagggggttttctgggcctctccaatattaagttcaggccaggatctgtggtggtacaattgactctggccttccgagaaggtaccatcaatgtccacgacgtggagacacagttcaatcagtataaaacggaagcagcctctcgatataacctgacgatctcagacgtcagcgtgagtgatgtgccatttcctttctctgcccagtctggggctggggtgccaggctggggcatcgcgctgctggtgctggtctgtgttctggttgcgctggccattgtctatctcattgccttggctgtctgtcagtgccgccgaaagaactacgggcagctggacatctttccagcccgggatacctaccatcctatgagcgagtaccccacctaccacacccatgggcgctatgtgccccctagcagtaccgatcgtagcccctatgagaaggtttctgcaggtaatggtggcagcagcctctcttacacaaacccagcagtggcagccacttctgccaacttgtaggggcacgtcgcccgctgagctgagtggccagccagtgccattccactccactcaggttcttcagggccagagcccctgcaccctgtttgggctggtgagctgggagttcaggtgggctgctcacaccgtccttcagaggccccaccaatttctcggacacttctcagtgtgtggaagctcatgtgggcccctgaggctcatgcctgggaagtgttgtggtgggggctcccaggaggactggcccagagagccctgagatagcggggatcctgaactggactgaataaaacgtggtctcccactg

SEQ ID NO: 114 - DNA, 1008 bp, Homo sapiens
ctgtcctctctgacaccaccccggcctgcctctttgttgccatgagagctgcctacctcttcctgctattcctgcctgcaggcttgctggctcagggccagtatgatctggacccgctgccgccgttccctgaccacgtccagtacacccactatagcgaccagatcgacaacccagactactatgattatcaagaggtgactcctcggccctccgaggaacagttccagttccagtcccagcagcaagtccaacaggaagtcatcccagccccaaccccagaaccaggaaatgcagagctggagcccacagagcctgggcctcttgactgccgtgaggaacagtacccgtgcacccgcctctactccatacacaggccttgcaaacagtgtctcaacgaggtctgcttctacagcctccgccgtgtgtacgtcattaacaaggagatctgtgttcgtacagtgtgtgcccacgaggagctcctccgagctgacctctgtcgggacaagttctccaaatgtggcgtgatggccagcagcggcctgtgccaatccgtggcggcctcctgtgccaggagctgtgggagctgctagggtggtgctggcatcctgagtcctggccctcctgggatctggggccctcgggctacctgacctggtgcttttttccccatccccatgttccttttattctgaaaaagttagtggactgcagccctgggggttgcaggctgcggtgcctcaggcccctccttcagcctgtggccacctctggggcacgatgggggctccccactgcccagtctgcccctcgggttgggggagtatcccaggcctctctgtgggacctgggcctgacgggcccttctcagcccgttttgaggacagacagtcccccgaggtaggctacatccccccaccccagctggtctgcttggatttcctacagcccccgtgggcatggaccacctttattttatacaaaattaaaaacaagtttttacaaaaa

SEQ ID NO: 115 - DNA, 8056 bp, Homo sapiens
ctgctctccctgagcccgctcccgagcgctgctttcccgccgcgggtgggcttcgcagcctcaggccagccgcggcccttggcccgctgcagccccggccctccaccttccccgtgcaggggcggcccggccagtgtcgctcatcccgggacgctcccttctcccacccaggactgccccgcggagctggcttggacacccaactttgccacctcgagggtcgtctctgctgggcgcgaacctgcccacccaccggttggccgcgcgctcggggaccgtgctcgtggcccccaagccggtgcccccattctggaactcagcgagtagggggcggctctggggaagtggcagggggcggctgcagctgctgcctccacttccctagccaggtgctgaagaggatcctcggagccgctctggcccccaggcgctggatgactggcaccagcgctcctcgcacctgtgttggtgtgtgagacttgggctggagtgcccacgtggctgtggagtcagtgtgattcatgattgaggaaacgcgtcctccatcctctctctccttggcactttccacacatgaggagaagaagagcttctgtttagaagacacgtgcccagagtcagaggccccttgcccaccatgaagggaacctgtgttatagcatggctgttctcaagcctggggctgtggagactcgcccacccagaggcccagggtacgactcagtgccagagaaccgagcatccagtcatctcctataaagaaattggcccctggttacgggagttcagagcgaagaatgctgcggatttctcgcagttaacatttgacccaggacagaaagaacttgttgtaggagcaagaaactacctcttcaggttacagcttgaggatctgtctcttatccaggctgtggaatgggagtgtgatgaagctaccaaaaaggcctgttacagcaaaggcaaatcaaaggaggaatgtcagaactacatccgggtgcttctggtgggtggcgaccggttattcacctgtgggaccaatgcattcacgcctgtctgcaccaaccgctcgttgagcaacctggctgagatccatgatcagatcagtggcatggcccgctgtccctacagtccccagcacaattccacagcgctcctcacagctggtggggagctctatgctgctacagccatggattttccaggacgtgatcctgccatttaccgaagcctaggcattttacctcctctccgcacggcgcagtacaactccaaatggctcaatgagccaaactttgtgtcatcttatgacatcggaaattttacctacttctttttccgagaaaatgcagtagagcatgactgtgggaaaacagtgttctccagagctgcccgggtgtgcaagaacgatattggtgggcgcttcctgctggaagacacctggaccacattcatgaaggctcgcctgaactgctcccgtcctggggaagtccccttttactacaacgaattgcagagtactttcttcctgcctgagctggatttgatctatggcatctttaccaccaatgtgaacagcattgcggcctcagctgtgtgcgtcttcaacctgagcgccatcgcgcaggccttctctgggcccttcaagtaccaagaaaactcgcgctcggcctggctaccgtatcccaacccaaacccccacttccagtgtggcaccgtggaccagggcctgtacgtgaacctgaccgagagaaatctgcaggatgctcagaagttcattctggtgcatgaggtggtacagccagtgaccacagtgccctccttcatggaggacaatagccgcttttcccacgtggcagtcgacgtggtgcagggcagagaagcgctcgtccacatcatctatttggccacagattacggaaccattaagaaagtgcgggtacccctgaatcagacctcaagcagctgtttgctggaagagattgagctcttccctgagaggcggagggagcccatcaggagcctgcagatcctgcacagccagagtgtcctgttcgtggggctgcgggagcacgtggtcaagatccccctgaagaggtgccagttctaccgcacacgcagcacctgcattggggcccaggacccttactgtggctgggatgtggtaatgaagaaatgcacaagcctggaggagagcctgagcatgacgcagtgggaacagagcatctctgcgtgtccgaccaggaatctcaccgtggatgggcactttggtgtgtggtctccgtggacgccttgcacgcacacagatggcagcgccgtgggatcctgcctctgtcgaacccgctcctgcgacagcccggccccgcagtgtggtggctggcagtgcgagggccctggcatggagatcgccaactgttccaggaacggaggctggactccctggacctcgtggtctccctgcagcactacctgtgggatcggcttccaggtgcggcagcgctcctgcagcaaccccactcccaggcacgggggccgggtgtgcgtgggacagaaccgcgaggaaagatactgcaatgaacatttgctatgtcccccacacatgttctggacaggctggggtccttgggaacggtgcacagcccaatgcgggggtggcattcaagctcgccgcaggatctgtgagaatgggcctgactgtgcaggctgcaatgtggagtaccagtcttgcaacaccaacccgtgtcctgagctgaagaagaccacgccctggacaccctggacacctgtcaacatctctgacaacggcgaccactatgagcaacgattccgatacacatgcaaagcccgcctggctgatccgaatttgctggaagtgggaagacagagaatcgaaatgcggtactgttctagcgacggcaccagtggctgctccacagatgggctttctggggatttcctgcgtgctgggagatactctgcccacacggtcaacggggcttggtcagcctggacgtcgtggtcacagtgcagccgtgactgcagcaggggcattcggaaccggaagcgtgtttgcaacaaccccgaacccaagtatgggggaatgccttgccttggcccatctctggaataccaggaatgcaacactttgccctgcccagtggatggcgtgtggtcttgctggtccccctggacaaaatgttcagcaacatgcggcggtggacactatatgaggacccgctcttgctccaatccagccccggcctatggaggggacatctgcctggggctgcacacagaagaggcactctgcaacacgcagccctgcccagagagctggtcggagtggtcggactggtctgagtgtgaagcctctggcgtccaagtccgcgcccgccagtgcatcctcctgttccccatgggcagccagtgctccgggaacaccacggagagccggccgtgtgtgtttgactctaatttcatcccagaagtatctgtggcaagatccagtagcgtagaagagaaaaggtgtggagagttcaacatgttccacatgatcgccgtggggctgagcagctccatcctcggctgcctcctcaccctgctcgtctatacttactgccagcggtaccagcagcaatcccacgatgcgactgtcatccaccccgtctcacctgccccccttaataccagcataaccaaccacatcaacaaactggacaagtacgactcggtggaggccatcaaggcatttaacaaaaacaacttgatcctagaggaaagaaacaaatacttcaacccacatctcactgggaagacctattctaatgcctactttacagatctcaataattatgatgagtactaacagctttcatgttttgggcttcttgtaaatccccagttcctcaaggcctgtgccccatgactgcccatgtttctgaggcttcagagtcgaagtttggatacatttcaagtgcatttcaagccaccagagtgtcccattggtgccaaaaatacacgtctttaaaagcaacaaaaattgaaataagacatcgtgaaaatcttgaccattgttgattgagccagggtggtgaagtttttaattggtgttcatcctatttttctgacaagtccattggtttgttttttgagcattattttataaatgtgccacccacattggaaggagtctttctttagaactttggagtgtaaatcttcatgatgttgtaaattcaagaaaataggcactttctctgaaagacctgctccttccacaagaagtgcataggtccataatatttcataaaatgaagaaaaagaatgtggccaaacaattattcaccatggattgcccaactttccaaatctggataaagctgtgggattcttggaagcagcttgagtgttttcatcttgcctgggaagcccaggaattccacctggtccacaccggcagaagttacagtagactgtgaggcaccccaccttgctcctgatgcagtttctgtgccattgctggtgctggtggaggcagcggagcagaggctcaggcacaatgaagcgtggatgtgttctgcaggttgctgcaaaactcaccttattctgacttttggatttcatggcattccaggaagctccttgccatgctgttggcctggaagtccacctgtctggtccatagtgacgtcctgaagagccagtctgtaaaataaccaaccacttacttagcgtttggatagactccatgccttctctctccctgcaaagaaaaatcttgaacatttatgatgtcaattagtgaaagtattgaaaatactaaattataactaaaagcaactttttatgttattgaaaatattgaaagaactgatattaatgataatcattttatttttcatctctctgatatacccaatgtgtggcaatcagcccctaccatgagcattaatgccatgtaaagctggctttctggagtctgccaggtccacacgaagtgctacccccagtttctgctgttacttgctgcctccaggccaggggagcaggagatgctcagctctggtgccttttcttttatttcagtgctgccttcccacccacccagtccattcaccctcacctctccctgcatggaggcaacagcatttccaagatgtaccttgggaagtcaggatagctggaagtaagggtttttggggatccctgtggtctcttcactgatcatcgataagcatttaagagtgtgctaacaccattcacagaggtccctggaaaaaaatatataattttctcacaaacaaccaatacataacctatggcagttggttgaataattattgaaaaaaagaacacgactgaaaaagttcatctgatgcctctgagcatgtgataaagtcctgggtagacatggaaacgtgttcttacaaatgaaccttcggatctatgaaagaaaatatagtagggggactaaggaacatagaattttattagcatatgtgattttacccttatctttgtttctaatttaaagaaacaatttcagaaagtgttagaagaattctatgtttaataatgaatattgttgagttcaaaatattctcatatacccagatttacagagatgacacagtattgaaatggcaggtgggctctgtaagttatttggggattaatgaaatccagggtcttggcaggggggactcaatgtggccctctcactcatccctcatatgtcaagagtccttcctgtcttatatgcacatgctccaaggtccatactcagtagggggaaatctagccggatggttccccaattgttcctcggctggattttcatcatcagaaatttccaactcatctcatcagttttcttgtaagaaaaaaacatttttcactttgtagcacaattttagttatttttgagtcttcttccctaatagtttgtaagcttaaagggacaattttaattttcccctggttaaagagggattctaatatttccaagaatgttttccactggaattgatgggaaatggtttctaaatggcatcgaagctggtctttaatgatcttttgcaatgacttgggaaaaacaccctccctcactacaggatcttcatgttgttaataatataaacaaacctttgaaattagcattgcaaaagaatcccatttttgtttcgtaccacactgttcaaaggaaaattgtttatctctcttcctttctctctctctcttatttgacagaatagcaagtgtttagataatttcagatatattcctaagtattttaccagctgtggaataagttgtgtttgtccatcactgtgtagctaccgttcacatgttctggctctgtactccacgcttatcgcgtgaaccctcacatgttggactttcacagtgtgatctctcacctgtcttggaaactccttcataaagccgctcttccttaggcctgggctgtttggaagtcctggtgaaactttgcggttcacattttaaattcctgaatgaccttttcattctctctttctttatctttgtttttgtccttcattccctccttttgttcttccttcctgcctttcacgtcacctacttatccgactatttcctccatttgcttcttttctatttgccatcacctgtgacccgagtggaacaaaaaccaacacatagttttaagctacacctttctgcacctgatgtaaaatgacattaatccactatttaacttctaaaattatttctgaatacagttgcagataggctggttttcatgaggaagctcgcttggctttagtcttacatttaaattctttgaaagtggctcccagtgctattcagggtcctttcttgaggccagactcatcaccatctactattgattttacagtgcactgacagtttacaggaaggagaagaacagaatttctgcacactacacaacatgtgggcttcctgtagctccagggacatgtagctttggtgaaactggggttttgtaacctctgaatgatatggacttagtgaattctaaggaactcagggggcacgtggtcaggctccaccgcacagaagagccacagtctccagactcatggcgttccctccagaactccccattcccctctgagcatatttctatgctgctgcttcttgtgacttacatgaggcatctcagcttcttcatgtttgtagggatggttccctaagcctgttcaagtaggctctcactagagttaccattcatatttgagaagaaaagaacatttattaaatgtatgtgtggggctgaggttctaaaggaattgaaaagagacgataaacattgaatgagggtgagggcatccctgctggggagaaacctctgtcccctaggaagagtccgttcatgtcatgtggtttgggatgaaccaggggtctgcccccatcgggtcacaggtgatgccaaatagaaaagaagcaaatggaggaaatagtcggataagtaggtgacgtgaaaggcaggacctggtcaccccagcaagtgctatggacagttcccggaaacggttgcccacttcacaggtccatgggtctgacccttggactctgccaggatcaactgcccagagtgccagagttttagccaaaggtgtacttacttccttatttatctccaaaaggatggaaactgtgggagtcaaagcctattttgctgagtgttcccactggatcctctgtagaattagcaggtcatgctgtcaaaatcatggacaaaggctgggtgcagtggctcatgcctataatcccagcactttgggaggccaaggtgggcggatcacctgagctcaggagtttaagaccagcctgggcaacatggggaaactccatctctacaaaatatacaaaatattagccagccatcgtggtgcgtgcctgtggtcccagtttcttgggaggctgaggcgggagtatcatttgagccaggaggttgaggttgcagtgagctgagatcacatcactgcactccatcctgggtgacagagagagaccctgtctcaaaaaaaaa

SEQ ID NO: 116 - DNA, 5382 bp, Homo sapiens
caggatggccctggacgaagtgtgggacagcagccacttcgcgctccagccgggccgcgccgaggacggccccggcgcgagcctggcactgcgcatcctggcggctcggctgccggattccggcgtctacgtgtgccacgcccgcaacgcgcacggccacgcgcaggcgggggcgctgctccaggtgcaccagccccccgagagcccgcccgcggaccccgacgaggcccccgcgccggtggtggagccgctcaagtgcgcgcctaagaccttctgggtgaacgagggcaagcacgccaagttccgctgctacgtgatgggcaagcccgagcccgagatcgaatggcactgggagggccgcccgctgctcccggaccgccgccgcctcatgtaccgcgaccgcgacggcggcttcgtgctcaaggtgctctactgccaggccaaggatcgtgggctctacgtctgcgccgcgcgcaactcggcgggccagacgctcagtgccgtgcagctgcacgtgaaagagccccgcctccggttcacacggcccctgcaggacgtggagggccgtgagcacgggattgccgtgctggaatgtaaagtacccaactcccgcatccccacggcctggttccgtgaggaccagcggctgctgccctgccgcaagtacgagcagatcgaagagggcactgtccggcgcctcatcatccacaggctgaaggcagacgatgatggtatctacctgtgcgagatgcggggccgggtgcgcaccgtggccaacgtcacagtcaaagggcccatcctgaagcgcctgccccggaagctcgacgtcctggaaggagagaatgctgtgctgctagtggaaactctagaggccggggtcgagggacgctggagccgtgatggggaggagctgccggtcatctgccagagcagctcaggccacatgcatgccctggtccttccaggggtcacccgagaggatgctggcgaggtcacctttagcctgggcaactcccgtaccactacgcttctcagagtaaaatgtgtcaagcacagtcccccaggaccccccatattggcagagatgttcaagggccacaagaacacggtcctgttgacctggaagcctcccgagccagctcccgagaccccattcatctaccggctggagcggcaggaagtgggctctgaagactggattcagtgcttcagcatcgagaaagccggagccgtggaggtgccgggcgactgtgtgccctccgagggtgactaccgcttccgcatctgcacagtcagcggacatggccgtagtccccacgtggtgttccacggttctgctcaccttgtgcccacagctcgcctggtggcaggtctggaggatgtgcaggtatacgacggggaagatgccgtcttctccctcgatctctccaccatcatccagggtacctggttccttaatggggaagagctcaagagtaacgagccggagggccaggtggaacctggggccctgcggtaccgtatagagcagaagggtctgcagcacagactcatcctgcatgccgtcaagcaccaggacagcggtgccctggtcggcttcagctgccccggcgtgcaggactcagctgccctcacaatccaagagagcccggtgcacatcctgagcccccaggacaaggtgtcgttgaccttcacaacctcagagcgggtggtgctgacttgtgagctctcaagggtggacttcccggcaacctggtacaaggatgggcagaaggtggaggagagcgagttgctggtggtgaagatggatgggcgcaaacaccgtctgatcctgcctgaggccaaagtccaggacagtggcgagtttgagtgcaggacagaaggggtctcggccttcttcggcgtcactgtccaagatcctcccgtgcacatcgtggacccccgagaacatgtgttcgtgcatgccataacttccgagtgtgtcatgctggcctgtgaggtggaccgagaggacgcccctgtgcgttggtacaaggacgggcaggaggtggaggagagtgacttcgtggtgctggagaatgaggggccccatcgccgcctggtgctgcccgccacccagccctcagacgggggcgagtttcagtgcgtcgctggagatgagtgtgcctacttcactgtcaccatcacagatgtctcctcgtggatcgtgtatcccagcggcaaggtgtatgtggcagcagtgcgcctggagcgtgtggtgctgacctgtgagctatgccggccctgggcagaggtgcgctggaccaaggatggagaggaggtggtggagagccccgcgctgctcctgcagaaggaagacactgtccgccgcctggtgctgcccgctgtccagctcgaggactccggcgagtacttgtgtgaaattgacgatgagtcggcctccttcactgtcaccgtcacagaacccccagtgcggatcatataccctcgcgatgaggtgaccttgatcgccgtgaccttggagtgtgtggtgctgatgtgtgaactgtctcgggaggatgcccctgtgcgctggtacaaggatgggctggaagtggaggagagcgaggccctggtgctggagagggatgggccacgctgccgcctggtgctacctgctgctcagcccgaggacgggggcgagtttgtatgtgatgctggagatgactcggccttcttcactgtcactgtcacagagcctccagtgcagttccttgctctagagacaactccaagcccgctctgtgtggcccctggggagccagtggtgctgagctgtgaactgtcccgggctggcgcccccgtggtctggagccacaatgggaggcccgtgcaggagggcgagggcctagagctccatgccgagggcccccgccgagtcctctgcatccaggctgcaggcccagcccatgcagggctctacacctgccagtctggagcagcccccggagccccaagcctcagcttcaccgtccaggtggctgagccccctgtgcgggtggtagctcccgaggcagcccagacgagggttcggagcaccccaggcggggacctagagctggtggtgcacctctccgggccagggggccctgtacgctggtacaaggacggggagcgactggcaagccaggggcgggtgcagctggagcaggccggggccaggcaggtgctgcgggtgcagggggcacggagcggggacgctggggagtacctgtgcgatgcgccccaggacagccgcatcttccttgtcagcgtggaagagccactgctggtgaagctggtctcggacctgacaccactcactgtccacgagggcgatgatgccacgttccggtgtgaagtctccccaccagatgccgatgtcacctggctgcgcaatggggccgtcgtcactccagggccccagagacagagctgctgttcctacggcggttgcaggatgtgcgggcagaggaaggccaggacgtgtgtctcgaagtggagacaggccgagtgggtgcagcgggggccgtgcgctgggtgcgaggtgggcagcccctgccccacgactctcgcctgtccatggcccaggatgggcacatccaccgcctcttcatccatggtgtcatactggccgaccagggcacctacggctgcgagagccaccacgatcgcaccctggccaggctcagcgtgaggcgacgggaacgcgcttacgcctagcccgcggctccggctccaggccctcggcacgcgccgccttctccagctgcgacgctgcggcccctcggacgccgggacctacagctgcgcggtggggacggcccgcgccggaccggtccgcctgaccgtgcgcggtgggtacggggtgatgtggaggctgggcactgctttgggcgcgagacttgcggagctgtcttccccggaccctgatgaccgcgcgtgcttctagaaagggggcgtggagggggcgtgaccggtaactgccctctgccccgccccgctcacgccccgggctccgccccagagcgtactgtggcggtactctccgagctgcggtcggtgagcgcccgcgaaggcgacggcgctacgttcgagtgcaccgtgtcggaggtcgagaccacggggcgctgggagctcggaggccgcccgctgagacccggagcccgcgtccgcatccgacaggaagggaagaaacacattctggtgcttagcgagctgcgcgccgaggacgccggtgaagtccgcttccaggcggggcccgcccagtccctggctctactggaagtggaggcattgcctctccagatgtgccgccacccccctcgcgagaagaccgttctggtgggccgccgggcggtgctggaggtgactgtgtcccgctcggggggccacgtgtgctggctgcgggagggggccgagctgtgcccgggagataagtatgagatgcgcagccacggccccacccacagcctggtcatccatgacgttcgacctgaggaccaaggcacttactgctgccaggccggccaggacagcacccacacacggctgctggtagagggtgagtaaagccaactgggcagcggcaggagggtgagggcgcctgggagctgatgggttaagccacacctatgggaggctttccaggacttggggtggcaacgggtcctgggatacgtaggaggtggggatgggggaggggaggggtagagcacacccagggctggaaagccctggaactgcttggctcagatcagctgctcctggtcagctgttcccacctttctacgccccttcttgccaggcttctcctctctcctgccactggaccatgtttgtctctcttgaacagccctgtttctaccagttcctttcctccccacttcaccaacactgccttcctccagcctgtccctcctccttcctgccctctgcccagcttgcctctgcccatctcagcaagttccatgtcagcctcggcagaagcctctttctttcctcttccccataagagacatcccaccttctatcccaaatcccagcattcccttcaggtgccacgctgtgccccacccctagctgacccccaccttcttgccgccaagacagccctaaccaaggcccagaaagggtagggcagaacctgggggcccagctctttgtgtactggtgtccaggctctgccaggggagaggaaggtggtacccccttctctccccagccccatgtggagtcattcctctgcaggcaactaggagaacctaaccaggccaggcgggtgcccttggacagcttggaaggcgtttgcccttaccctgggcaggggtagagagacaaggaacaataaaagtgctacagctc

SEQ ID NO: 117 - DNA, 1588 bp, Homo sapiens
aaactaaaattttcatggtaaaatgccagcatgtatgtacttgtgtagtgtgtacttctaaacagagaaggcttataaaagtaaatgcattaaggccaagtgcagtggctcacaccggtaatcccagcactttgggaggccgaggtgggaggattgcttgagctcatgagttcaagaccagtctgggcaacatagcgagactccatctctataaataaaaaaaaaggaaatgcattaaatagaaggttgatagtttatcataaacctgcggggaagaaactcagactttctatttttgatattttgtgcattaatacattacaaacatgaagatgtttgtaaagttttgttttagtcattttctttgcagtcacatcattgtaccaccttcattattgtatagagctgcttcaattctgagtcctctggacttcccctgcctatctgtttgttgttgttgttgaagacagtaaaataagtgttttcaaatctatatgtctcctttttgttggataatgtttcttctttttaatggtaaatattcttgttcttcaacatttttctttggttctttttccttttttaggaaaaacaaaacaacagacttcatccttaggttttctcaagatttaagtgaacacatttacacatatcaatttcttaaagaacacaaaatgtttcctccctagcaaaactatttaagagccaattaaactatgaaatagttataaaattatttttaatatttaaggccttgaaattatattccaaggcaaatctaaatgggtgtagttgtatatgcacgatgtaatttaatgctaaagagtacttacagcttgagggaaaagcataaagttttagttaaatagccttcatactgtggatttttcctcctactaactaatatgtgggaaattaagattacagatgctttgggccccctcaaacagtacattgctacagttcactgtagcaacagatttggtggtgatggggggatagaggtagaagcagatagaaggtaattttaaagttaatttattatgaatcattttcccctaatctgcataaatgaattagaactgattttaataaaaatattctgtgtaaaaagtactcagaaaaacatctaaagctgttggagaagagggactcatataaatagttggattgcgttttgctttttatttctttataaaaatatgtcaaaaacagtttttaattttagaaatcttatacttgaaagaaacctcaattatcagtggctttatgaagtaaagttaaaaacaaacataggaaatgtgaaaatatttgtgtttgttttgtctgactaacttgctgctaaatgctatctttaggtgtgtgaaagttctttgatatgttattgtccttttacatcttgttaaatagccattgcttttgagaatcagatagtgtgttgtttaggggttaattgtgtctatatctttcaaaaacttttatattatgtattataagaagttacagtagtaccattttgattagtctgaatgttttcaggccttgaaataaattttgactaagtgataaaaaaaaaaaaaaaaaaaaa

SEQ ID NO: 118 - DNA, 7855 bp, Homo sapiens
aagatttacagtatgtaaagaagcagatattcacaaacacagttgctaggtttgctgcagatcttgctgaagagcttgtttttgaaggcatcatggaggtgtgtcagttttcatatcctcaaacgcctgcatctccacagtgtgggtcgtttgactttgaagacaaagtagtgaagttgtatgcaaaagatttgtctgaatctgtaatacaggaagcattcattgagctatcacaagttgatgtgacctttacaacaaaggcagcagttagtgtctctacggataatatcaagtatgtgagtgcagaaagtgtagtgccatcgacacaggctgtcacgttttccccttcttttcacaatcaagcaattatggtgacaaaaccagtgcaggaatataaaaaggaatacacagtgcagcaggccttgttttgtacttctggaattgttacttctataccggtgcccttggcaggaagtgcccttctcccatatcatatttcatctactgcatgtcaggccaaggctcatctgtcatctgatgatagtaattcaaatggtgattctgcccaagtgcatattgccacaaaaaacagagaagaaaaagcagcttgtctcagaaatatttgtttaccttcagaacacaatccaggtaatcagaatgattttaaaccaactaatgacgatattgaaatgcagagttcctcaaaattaccaaatgatcctgcaattattagcaacttttctgcagcagtggtgcatacgatagtaaatgaaactttagagtcaatgacatcattggaagttacaaaaatggttgatgaacgtacagattatttaactaaatctttaaaggagaaaacccctccattttcccactgtgatcaggcagtgctgcaatgcagtgaagctagtagcaataaggacatgtttgctgaccggttatctaaatctattattaaacattccatagataagagcaaatcagtgatcccaaatatagataaaaatgcagtatacaaggaaagcttgcctgtttctggagaagaatcacagttgacaccagaaaagtctcccaaatttcctgactctcagaatcagttaactcactgctcactttcagctgcaaaggattgtgttccagaatgtaaagtttctatggttcatggatcctccctagagacactgccatcttgtccagctgtgacaggtcagaaatctgacttgaaggaatctgctaaggatcaaccactgaaaaagcataacttgaatagtacatcacttgaggccttgtcttttggacaggaaaacccctttcctcattcacatactttctcatctacagcacttacctgtgtagatggtttgcatgtggaagataaacagaaagtcagagacagaaatgtaatacctgatactcctccatcaactcctctagtaccatcccgggctagttctgaatgggatatcaagaagttaactaaaaagctcaagggagaattagccaaagagtttgcacctgctacaccaccttctactccacacaactcatctgttggtagtttgtctgagaatgaacaaaatactatagaaaaagaagagttcatgttgaaactcatgcgatctctttctgaagaagttgagagtagtgaaagtggagagctcccagaagtggatgtgaagtcggagcactcagggaagaaggttcagtttgcagaagcattagctacacacatcctttctcttgcaactgaaatggcagcttcccatttagataacaaaataattcaagaacccaaggttaaaaacccttgcttaaatgtgcaaagtcaaagaagtgtgtcgcctacttttttaaacccctcagacgaaaatttgaaaacattatgcaattttgcgggtgatctggcagcagaagtcattacagaagctgagaaaatagcaaaagtccgaaattgtatgcttttcaagcaaaagaagaacagttgttatgctgatggtgacgaagattataaagtagaagagaagttggatatagaggctgtagtgcacccaagagaagtggatccgtttattctttcattaccaccaagttcttgtatgtcaggtctgatgtataagtatcccagctgtgaaagtgtgacagatgaatatgcaggtcaccttattcagatactaaaacaggaaggtggtaatagtgagttgataatggatcagtatgccaataggcttgcctaccgatctgttaaatcaggattacaggaagcagctaagacaaccaaagtgcagtgcaactcaagaatgttccctgtgccaagttcacaagtgaaaacaaacaaggaactgttaatgttttcaaacaaagagcaccaccaagaagcagacaaaaagagacaaagtaaaagaaatgaaggttacttttgtaaaaatcaaacttgtgaaaggaccctggatccatatagaaatgaggtctcccaactgtatagtttttcaacctctctcgttcacagcataacaaaagatgctaaggaagagttgacagcctctctagttggcctaccaaaatccttaacagattcttgcttgtttgaaaaatctggatatgaagaagataatgagtgtcacgttacaccagaattgcctaagtctcttcagccttcctcacaaaatcacaggttttaccacagcactggcagtttaaatggatatggttgtggagacaatgttgttcaagctgtagaacagtatgccaaaaaagtagtggatgacactctagagctaactctaggatctacagtgttccgagtgtctgagaccacaaaatcagcagacagggtcacttatgcagaaaagttgtcacctcttacaggtcaagcttgcagatactgtgaccttaaagaactccacaattgcactggaaattcatctcagcactttttcagacagggttctctcgccagtagtaagccagcttctaatccaaaatttagcagccgctatcagaaatctaggatttttcatctcagtgtccctcagattcatgttaatcttgataagaaggcagtgcttgctgagaagatagttgctgaagccattgaaaaagctgagcgagagctgagcagtaccagcctggcagccgacagtgggatcggacaggagggtgccagctttgctgaaagccttgccacagaaaccatgacagcagctgtcacaaatgttgggcatgctgttagcagttcaaaagaaatagaagactttcagtcaactgagtctgtcagtagccagcagatgaacctcagtattggtgatgacagcactggtagctggtccaatttaagttttgaagatgaacaccaagatgaaagcagcagttttcatcatctaagtgaaagtaatggtaacagcagtagctggagcagtcttggtttagaaggagatttgtatgaggacaatttatcctttccaacatcagacagtgatggaccagatgataaagatgaagagcatgaggacgaagtagaaggtttggggcaagatggaaagacactgctaattacgaatattgacatggagccatgcacggtagacccccagctaaggattattcttcagtggctcattgcctctgaggctgaagttgcagaactttattttcatgactctgcaaataaggagtttatgctactttcaaaacaattacaagagaaaggatggaaagtgggagacctcctgcaggctgtgcttcaatactatgaagtgatggaaaaagcttccagtgaggagagatgcaagtcgctgtttgattggctcttggaaaatgcatagagcaaaccccaaaccagtatattttagtatttgtttggggaggggaacaagccaataaagatgtttaggataaaatttgaatagtgaatattaacatcgtaagtcagttgggaggcaagtaaatatagctttctgagcgctttgtgttatcactcggtgtatatagttcatacttttgtaatctgtcaaaatactaccttcatttattcttctatacacatgtgtagtgtgtcaagaccctaagaacatgtatttgaaggaaggtctaaccagggggttttcaggggcattgtctgaccacattctttttgtatccaaatagtgctgctagaaactgcactgaagtggctgaggataggttccagtgatagagttataattttgctcctttgcaaacaaatggtatctaattaataactagtctgacatcagaaaataaaattgaggctgatttttaaaaatttctagtagatttttggcctttctttcctgtttttaaaaatcagtttcattttcatatttcatagatcagctattggtagctttttgatttccccaaactatttaatttcttagcagaaacattagtattttaggtttctataaacactataagtgatagttttccccatcctttcattgacattatttgccaatgctgccagtcattctggcatgaaaggtgtgtgtgtgtgtgtgtgtgtgtgtgtgtgtgtgtaagggagtactttaaccttgccagtttgttccctcttttattttactgttttctttttagaaacccactgttaaaatttaaaaaggtgctttaaaataaaacgcctataaagattgtgcagtaagaatttttattgacaataattaaaattttttttgacaattttgggttcccaacttatcttacaagtgaaaacttaatttgtaaaacatgttgaaattttaaaaattaatgttaatatggaaatgcatttagagaagcccagtagtttttattgttggatttttgaaaaaacctctaccaagaatatggtgttttttttgtttgtttgtttgtttgttttagaaaaattgggatttccccccaccccgccccacccagataaactatatctacactgtctcgtcaagttctctgacacgatctttctgggctctacatttcctactagtttgtgtccagaaactgcaagttgacatgaatagaggacaaaggttgtgtcttgcttttgtctctctcttccctccctgcaactctctctcccctcctcccactctcttccccctcccccctcctcccactgtctctcacctcccccaccccccactctctctcatctctcgctgtgtcctgtgtatgtgtgggtgtgtgtgtatttgggtgtgtaaatgttggttcttccactactggattttgtaatctaggataaatcactttttttggggactttgattttgctccattacgttttcattttttctgagcactgactgttctgaaagctgcacaaaacgtagaaagaagacatagcgcctgccagggaataggaaatgagggcacttacacattaatgtgaattagtaattgtggtatagaaatgttttatagtgaaagattcaaatttgcttttcaagaaaaatgccaaaagctatttaaataattcgaggttacatcgtaggttttgatttttctcaatttaagatacagaaatacagcaagccttaatataaagtttcctaaagtttcttcaagtattttttaaggtggagaaatgcaggaattgtataaccagaattgtttctgcctttagcttttcagaacttgagatgtggcagcactggactgggtttttttaaatgttaggactaggaatgtttgctcttgttaattatgaattaattgattattaagtttagaatgcatttttacaagtatctaactatcaaattgtgtttagtaacttgagtgtatgcacaagtttgatcaacagcaaaatagagttctgaatttcttttaaagtgatgatatattattttgtgaaactttgtgtttgaaaatgtttatttctgtttatggtgtaatcattctgaggtgaggcttttcttatttcctttgcattttgctagagctgtgctgagttcagcatttgcttatttaaccactacataatgacagaccagttattaggtattagcatgtgtggtaataataatagtggaacttcacacttacatcaattcagtgcaggggcatagaataaaatattaaatattggcagatgtatgaaaagaagtgtgagttaaaaatattgaatattggcaggtgtgaaaacaagtgtcaaaattcctcatatagagaaaagaattttgagtttagagtattatcttttaattaagtgtagtctaaacttaactttctgtaaaggcactttgtggtttttccaaagatgttctagatctatttggttgctctatagtcaaacagctcttttgaagacaactgtcttattttattacaaattggcttgacatatttatactgtaacattgtaatattgctgtgctgtacattttggcccttacgaaatacgtctttttcagaactgttaaagttttgatgtacatcgagctgaattctgtttttaccagtttcaaaaccttcaagtgatatgtggaaaaaagtgaatgagacctctgatagggggttttcagaaccttgttcacaccaaaatgcgacagttctttcatgttttcctaaaccaagttaaaattacatgtatattttggtgttaaggttgatttttaagatacttctgatttgtacaaaaggaatgtttcctttataaatcacagaagaaaatgacaatatctgttggatatttgatataatttaatggtgttataaaacctttaagaggattcatggtgaatatatgtgataacatctttatactttgaaaaatgttccacttacccttcagatatttgttgtaagttaattcaattcttaatactttaattttgctccaacaagggctttatgttgctggtaagagaatttatttactaaatgcactatgtataaagtgaaagatagtttacttatctgactttgatattagatggctgacattagtgcacataatgcagagtttaaccttgattcttcaacagagtccagatttaaatgtctacttagttaattagttagctgatattcttccacaattaatatattcaatttcccatcagtatatcactttaaattttatgtttttctaaggaaactttccacagaattttaaacaactgatgcatccatactcagggtgtagggagaatactttgcatttaaaaaccctgtccacctgtcaccagcacaagagaattagagcttcagtgagaatttagaaaaattatactaaagtgagatgcattttttctcattttcagcaagactcctctaagcatttactcatttactgtattcctgctctgaagatgtggatacagaattagtcactcttgtcactttatttatttattggtttttttttaaccatctgtgtacattcctttcatagggtagagttctagttctagaagttcttattttgtttttgttgtaatgtttgaatactatttaatatccggttttaatattgctggatttgctacctttggttacttgtgcagtgttaaaagtaatccactttcttgtttaatataccagatacatagcaaaagcagcttggaataattatagctgtttatttggctgtgctcagttactatattaagatcttgtactgtgtaacagtaactcttttttgcttttcagtaatttaatatgttcacttaacaaaatacgaactttgagatgcactaaagttttgtttcagcagtggctcaaaaaatttcagaaattacttttgtaattatttgcaattaattgttcttttatcttacaattgtttaagcctgtgatctttcttctcccagctaagagttcttcaataaatttaagaaatacctgg

SEQ ID NO: 119 - DNA, 3673 bp, Homo sapiens
gggcgctgtgcgcgccgcgatccggtacgtgggcctccgggctgtcccctctgggggcgatcctccctccggagccccccttcaaccctcccggaagtgaggaccagggatgctgtgctgctctcccatgagccagtcaccgagtcggtctgctgcagccctttctgaacctctggccgtctggatgctccactgtgcttgccaagatgaagtgcgtcttggtggccactgagggcgcagaggtcctcttctactggacagatcaggagtttgaagagagtctccggctgaagttcgggcagtcagagaatgaggaagaagagctccctgccctggaggaccagctcagcaccctcctagccccggtcatcatctcctccatgacgatgctggagaagctctcggacacctacacctgcttctccacggaaaatggcaacttcctgtatgtccttcacctgtttggagaatgcctgttcattgccatcaatggtgaccacaccgagagcgagggggacctgcggcggaagctgtatgtgctcaagtacctgtttgaagtgcactttgggctggtgactgtggacggtcatcttatccgaaaggagctgcggcccccagacctggcgcagcgtgtccagctgtgggagcacttccagagcctgctgtggacctacagccgcctgcgggagcaggagcagtgcttcgccgtggaggccctggagcgactgattcacccccagctctgtgagctgtgcatagaggcgctggagcggcacgtcatccaggctgtcaacaccagccccgagcggggaggcgaggaggccctgcatgccttcctgctcgtgcactccaagctgctggcattctactctagccacagtgccagctccctgcgcccggccgacctgcttgccctcatcctcctggttcaggacctctaccccagcgagagcacagcagaggacgacattcagccttccccgcggagggcccggagcagccagaacatccccgtgcagcaggcctggagccctcactccacgggcccaactggggggagctctgcagagacggagacagacagcttctccctccctgaggagtacttcacaccagctccttcccctggcgatcagagctcaggtagcaccatctggctggaggggggcaccccccccatggatgcccttcagatagcagaggacaccctccaaacactggttccccactgccctgtgccttccggccccagaaggatcttcctggatgccaacgtgaaggaaagctactgccccctagtgccccacaccatgtactgcctgcccctgtggcagggcatcaacctggtgctcctgaccaggagccccagcgcgcccctggccctggttctgtcccagctgatggatggcttctccatgctggagaagaagctgaaggaagggccggagcccggggcctccctgcgctcccagcccctcgtgggagacctgcgccagaggatggacaagtttgtcaagaatcgaggggcacaggagattcagagcacctggctggagtttaaggccaaggctttctccaaaagtgagcccggatcctcctgggagctgctccaggcatgtgggaagctgaagcggcagctctgcgccatctaccggctgaactttctgaccacagcccccagcaggggaggcccacacctgccccagcacctgcaggaccaagtgcagaggctcatgcgggagaagctgacggactggaaggacttcttgctggtgaagagcaggaggaacatcaccatggtgtcctacctagaagacttcccaggcttggtgcacttcatctatgtggaccgcaccactgggcagatggtggcgccttccctcaactgcagtcaaaagacctcgtcggagttgggcaaggggccgctggctgcctttgtcaaaactaaggtctggtctctgatccagctggcgcgcagatacctgcagaagggctacaccacgctgctgttccgggagggggatttctactgctcctacttcctgtggttcgagaatgacatggggtacaaactccagatgatcgaggtgcccgtcctctccgacgactcagtgcctatcggcatgctgggaggagactactacaggaagctcctgcgctactacagcaagaaccgcccaaccgaggctgtcaggtgctacgagctgctggccctgcacctgtctgtcatccccactgacctgctggtgcagcaggccggccagctggcccggcgcctctgggaggcctcccgtatccccctgctctaggccaaggtggccgcagtctgcctttgcatcctgtcctccagccacccttgcttgccactgttccccatgacgagagcctcctgtctgcagtggccatcctgaggatagggcagagtgcccagggtggccccagggcttctaaaaccccacctagaccaccctccatgtcaggtactgagcaaggccccagatccttctctctggaggaagagggaagcccaggggtcctgtttgtaaaacaacggtggcaacagctcctcttccagagctgcctctgcctttatcctgggagatggggaggaagccccatctctgctgttccctgcgtggaggaagcccacccagcaagctctctcctaccccaggtaaaaggtgctcctttgcctgggtttgaattccagcgctgccacttcctctctgcacctcctggcaagtttcttctattccccacgtttaaagcgatggcacctccgtcccagggtggtgtgaggattacccagtgtggtaggtgctcaataaatgttggtcattgttatcactgaagcccaacatgctagtgcttctagacccttctgtcagtgctgataagcccttgctaagtcccagccccttcatgcttggctggcgtctgccctagggctggggttctcaagcccctggccctggcccagagatttggattcccttggcggccgtggagcccaggctttgatgtctttcaaagcttctgtggtgcgccctggattgagaaccaccacccgaggggtacagcccctctcttccaaccgagaagttcctgtccagaatggacccagggacaagagaccctgagagccctgggactgggagtgtctgctcctctgagccaggaggccggtgctgggccagagaggacggcgtggcgaaagtcagcgtccactgcagcacaggatcagatggccgtgtgctgtgcatgcaggagcctcgccttctgtgtctttagtcttgagccaaaatttgctcaaaagactgatctcttccttgcagggaacagctttggggctgggggaactagaacccacatgttggtctaaaccctgagaaggtggcagtgaggaagtatcccctcaggtgactggatctgtgttcctccttaacatcatctgatggaatggcaatgaaaagcgtggattgtggaaaatacagaaaaacataaaggaaaaaactccaatcccctgagcccaccactgttcaggacccctgcttttgtcacctactatttccctttagtttttagcagcggctggatgtgatatgtctagtttaaccagtccccttgatctttctatataataaataacacaggagtgaacatcctgaatcag

SEQ ID NO: 120 - DNA, 692 bp, Homo sapiens
cccgcgcaggcgcagacggtggaagcggacgcaacatgccagtggcccggagctgggtttgtcgcaaaacttatgtgaccccgcggagacccttcgagaaatctcgtctcgaccaagagctgaagctgatcggcgagtatgggctccggaacaaacgtgaggtctggagggtcaaatttaccctggccaagatccgcaaggccgcccgggaactgctgacgcttgatgagaaggacccacggcgtctgttcgaaggcaacgccctgctgcggcggctggtccgattgggggtgctggatgagggcaagatgaagctggattacatcctgggcctgaagatagaggatttcttagagagacgcctgcagacccaggtcttcaagctgggcttggccaagtccatccaccacgctcgcgtgctgatccgccagcgccatatcagggtccgcaagcaggtggtgaacatcccgtccttcattgtccgcctggattcccagaagcacattgacttctctctgcgctctcctacgggggttggccgcccgggccgcgtgaagaggaagaatgccaagaagggccagggtggggctggggctggagacgacgaggaggaggattaagtccacctgtccctcctgggctgctggattgtctcgttttcctgccaaataaacaggatcagcgctttaaaa

SEQ ID NO: 121 - DNA, 2306 bp, Homo sapiens
ggtttcatatgaactctcccgccacccgggaacagctggctgccaccgtttgtgttttccgagtttgtattcttgcaggtgaccaagatggagttttctggaagaaagcggaggaagctgaggttggcaggtgaccagaggaatgcttcctaccctcattgccttcagttttacttgcagccaccttctgaaaacatatctttaacagaatttgaaaacttggctattgatagagttaaattgttaaaatcagttgaaaatcttggagtgagctatgtgaaaggaactgaacaataccagagtaagttggagagtgagcttcggaagctcaagttttcctacagagagaagctagaagatgaatatgaaccacgaagaagagatcatatttctcattttattttgcggcttgcttattgccagtctgaagaacttagacgctggttcattcaacaagaaatggatctccttcgatttagatttagtattttacccaaggataaaattcaggatttcttaaaggatagccaattgcagtttgaggctataagtgatgaagagaagactcttcgagaacaggagattgttgcctcatcaccaagtttaagtggacttaagttggggttcgagtccatttataagatcccttttgctgatgctctggatttgtttcgaggaaggaaagtctatttggaagatggctttgcttacgtaccacttaaggacattgtggcaatcatcctgaatgaatttagagccaaactgtccaaggctttggcattaacagccaggtccttgcctgctgtgcagtctgatgaaagacttcagcctctgctcaatcacctcagtcattcctacactggccaagattacagtacccagggaaatgttgggaagatttctttagatcagattgatttgctttctaccaaatccttcccaccttgcatgcgtcagttacataaagccttgcgggaaaatcaccatcttcgtcatggaggccgaatgcagtatggcctatttctgaagggcattggtttaactttggaacaggcattgcagttctggaagcaagaatttatcaaaggaaagatggatccagacaagtttgataaaggttactcttacaacatccgtcacagctttggaaaggaaggcaagaggacagactatacacctttcagttgcctgaagattattctgtccaatccaccaagccaaggggattatcatgggtgcccattccgtcacagtgatccagagctgctgaagcaaaagttgcagtcatacaagatctctcctggagggataagccagattttggatttagtaaaggggacacattaccaggtagcctgtcaaaaatactttgagatgatacacaatgtggatgattgtggcttttctttgaatcatcctaatcagttcttttgtgagagccaacgtattctaaatggtggtaaagacataaagaaggaacctatccaaccagaaactcctcaacccaaaccaagtgtccagaaaaccaaggatgcatcatctgctctggcctctttaaattcctctctggaaatggatatggaaggactagaagattactttagtgaagattcttaggcagttttataaccctttttcctcaatagcctgtttcctgtttttaagattttgcctttgttgttgaaaaagggtttcactgtcaccaaggcttagtgcagtgacacaattacagctgattgcagccttgaccttcccagctcaagtgatcctcctacctcagcctcccaagtagttaggacacacaggtgtgcacctcatatccagataatttttttcaatttttttttgtagaggtggggggtctccctatgttgcccaggcagatctcagactcctgggctcaagcgatcctcacacctcagcgtcccagagtgctgggattacagttgtgagccactgtgcctggcctttttttttttttaaccttttcgtttaacttctctcttcactgcatcccaatccatctacaggcatgcacacttattaggaaaggaggtttgaggtaacaacagagactttcactatattttgctttgacagaaggaaagaggaggagtttctattaaaatctgtcacttgagtgatgtcatttaagtcctattttaggagataaaaacagctttggggactggttaaagtcccccagaaactacaataaagaacaacttttgttttaactcttaatcactttgtaattttgactcaatccttttctggaccatttttgttaataaatatcaaagtgt

SEQ ID NO: 122 - DNA, 2147 bp, Homo sapiens
gctgccctccccgtcagccgccctcgccgccgcggtgcgctggctgcaggaagccgccgcgccgccgcttttgttgtcagggacccagcgaggagcgccgctcgccggccgccgccaccctctctcgctgcagcctgctgtgcgctgcacggcctggggcccgggcgcccccgcgtctgcccatgagggggccccgcgaccaccgctgcttccagcccggggcggcgcggcgctgaggcggcggcggcggcggcctgccccctctgcgggaagcgggcggccccggccgcctccgcgagggcaccatggaggtgaatgcaggaggtgtgattgcctatatcagttcttccagctcagcctcaagccctgcctcttgtcacagtgagggttctgagaatagtttccagtcctcctcctcttctgttccatcttctccaaatagctctaattctgataccaatggtaatcccaagaatggtgatctcgccaatattgaaggcatcttgaagaatgatcgaatagattgttctatgaaaacaagcaaatcgagtgcacctgggatgacaaaaagtcatagtggtgtgacaaaatttagtggcatggttctactgtgtaaagtctgtggggatgtggcgtcaggattccactatggagttcatgcttgcgaaggctgtaagggtttctttcggagaagtattcaacaaaacatccagtacaagaagtgcctgaagaatgaaaactgttctataatgagaatgaataggaacagatgtcagcaatgtcgcttcaaaaagtgtctgtctgttggaatgtcaagagatgctgttcggtttggtcgtattcctaagcgtgaaaaacagaggatgctaattgaaatgcaaagtgcaatgaagaccatgatgaacagccagttcagtggtcacttgcaaaatgacacattagtagaacatcatgaacagacagccttgccagcccaggaacagctgcgacccaagccccaactggagcaagaaaacatcaaaagctcttctcctccatcttctgattttgcaaaggaagaagtgattggcatggtgaccagagctcacaaggatacctttatgtataatcaagagcagcaagaaaactcagctgagagcatgcagccccagagaggagaacggattcccaagaacatggagcaatataatttaaatcatgatcattgcggcaatgggcttagcagccattttccctgtagtgagagccagcagcatctcaatggacagttcaaagggaggaatataatgcattacccaaatggtcatgccatttgtattgcaaatggacattgtatgaacttctccaatgcttatactcaaagagtatgtgatagagttccgatagatggattttctcagaatgagaacaagaatagttacctgtgcaacactggaggaagaatgcatctggtttgtccaatgagtaagtctccatatgtggatcctcataaatcaggacatgaaatctgggaagaattttcgatgagcttcactccagcagtgaaagaagtggtggaatttgcaaagcgtattcctgggttcagagatctctctcagcatgaccaggtcaaccttttaaaggctgggacttttgaggttttaatggtacggttcgcatcattatttgatgcaaaggaacgtactgtcacctttttaagtggaaagaaatatagtgtggatgatttacactcaatgggagcaggggatctgctaaactctatgtttgaatttagtgagaagctaaatgccctccaacttagtgatgaagagatgagtttgtttacagctgttgtcctggtatctgcagatcgatctggaatagaaaacgtcaactctgtggaggctttgcaggaaactctcattcgtgcactaaggaccttaataatgaaaaaccatccaaatgaggcctctatttttacaaaactgcttctaaagttgccagatcttcgatctttaaacaacatgcactctgaggagctcttggcctttaaagttcacccttaaggcctttgtttatttaaacatgaactgatggtaactgtacattttgtgctaaaatgcatatttatatgtgcataccatatgtggagatagaaaagaccttta

SEQ ID NO: 123 - DNA, 2647 bp, Homo sapiens
gccgcgctggtggcggcggcgcgtcgttgcagttgcgccatctgtcaggagcggagccggcgaggagggggctgccgcgggcgaggaggaggggtcgccgcgagccgaaggccttcgagacccgcccgccgcccggcggcgagagtagaggcgaggttgttgtgcgagcggcgcgtcctctcccgcccgggcgcgccgcgcttctcccagcgcaccgaggaccgcccgggcgcacacaaagccgccgcccgcgccgcaccgcccggcggccgccgcccgcgccagggagggattcggccgccgggccggggacaccccggcgccgccccctcggtgctctcggaaggcccaccggctcccgggcccgccggggaccccccggagccgcctcggccgcgccggaggagggcggggagaggaccatgtgagtgggctccggagcctcagcgccgcgcagtttttttgaagaagcaggatgctgatctaaacgtggaaaaagaccagtcctgcctctgttgtagaagacatgtggtgtatataaagtttgtgatcgttggcggaaattttggaatttagataatgggctgtgtgcaatgtaaggataaagaagcaacaaaactgacggaggagagggacggcagcctgaaccagagctctgggtaccgctatggcacagaccccacccctcagcactaccccagcttcggtgtgacctccatccccaactacaacaacttccacgcagccgggggccaaggactcaccgtctttggaggtgtgaactcttcgtctcatacggggaccttgcgtacgagaggaggaacaggagtgacactctttgtggccctttatgactatgaagcacggacagaagatgacctgagttttcacaaaggagaaaaatttcaaatattgaacagctcggaaggagattggtgggaagcccgctccttgacaactggagagacaggttacattcccagcaattatgtggctccagttgactctatccaggcagaagagtggtactttggaaaacttggccgaaaagatgctgagcgacagctattgtcctttggaaacccaagaggtacctttcttatccgcgagagtgaaaccaccaaaggtgcctattcactttctatccgtgattgggatgatatgaaaggagaccatgtcaaacattataaaattcgcaaacttgacaatggtggatactacattaccacccgggcccagtttgaaacacttcagcagcttgtacaacattactcagagagagctgcaggtctctgctgccgcctagtagttccctgtcacaaagggatgccaaggcttaccgatctgtctgtcaaaaccaaagatgtctgggaaatccctcgagaatccctgcagttgatcaagagactgggaaatgggcagtttggggaagtatggatgggtacctggaatggaaacacaaaagtagccataaagactcttaaaccaggcacaatgtcccccgaatcattccttgaggaagcgcagatcatgaagaagctgaagcacgacaagctggtccagctctatgcagtggtgtctgaggagcccatctacatcgtcaccgagtatatgaacaaaggaagtttactggatttcttaaaagatggagaaggaagagctctgaaattaccaaatcttgtggacatggcagcacaggtggctgcaggaatggcttacatcgagcgcatgaattatatccatagagatctgcgatcagcaaacattctagtggggaatggactcatatgcaagattgctgacttcggattggcccgattgatagaagacaatgagtacacagcaagacaaggtgcaaagttccccatcaagtggacggcccccgaggcagccctgtacgggaggttcacaatcaagtctgacgtgtggtcttttggaatcttactcacagagctggtcaccaaaggaagagtgccatacccaggcatgaacaaccgggaggtgctggagcaggtggagcgaggctacaggatgccctgcccgcaggactgccccatctctctgcatgagctcatgatccactgctggaaaaaggaccctgaagaacgccccacttttgagtacttgcagagcttcctggaagactactttaccgcgacagagccccagtaccaacctggtgaaaacctgtaaggcccgggtctgcggagagaggccttgtcccagaggctgccccacccctccccattagctttcaattccgtagccagctgctccccagcagcggaaccgcccaggatcagattgcatgtgactctgaagctgacgaacttccatggccctcattaatgacacttgtccccaaatccgaacctcctctgtgaagcattcgagacagaaccttgttatttctcagactttggaaaatgcattgtatcgatgttatgtaaaaggccaaacctctgttcagtgtaaatagttactccagtgccaacaatcctagtgctttccttttttaaaaatgcaaatcctatgtgattttaactctgtcttcacctgattcaactaaaaaaaaaaagtattattttccaaaagtggcctctttgtctaaaacaataaaattttttttcatgttttaacaaaaacc

SEQ ID NO: 124 - DNA, 6129 bp, Homo sapiens
aattggaagcaaatgacatcacagcaggtcagagaaaaagggttgagcggcaggcacccagagtagtaggtctttggcattaggagcttgagcccagacggccctagcagggaccccagcgcccgagagaccatgcagaggtcgcctctggaaaaggccagcgttgtctccaaactttttttcagctggaccagaccaattttgaggaaaggatacagacagcgcctggaattgtcagacatataccaaatcccttctgttgattctgctgacaatctatctgaaaaattggaaagagaatgggatagagagctggcttcaaagaaaaatcctaaactcattaatgcccttcggcgatgttttttctggagatttatgttctatggaatctttttatatttaggggaagtcaccaaagcagtacagcctctcttactgggaagaatcatagcttcctatgacccggataacaaggaggaacgctctatcgcgatttatctaggcataggcttatgccttctctttattgtgaggacactgctcctacacccagccatttttggccttcatcacattggaatgcagatgagaatagctatgtttagtttgatttataagaagactttaaagctgtcaagccgtgttctagataaaataagtattggacaacttgttagtctcctttccaacaacctgaacaaatttgatgaaggacttgcattggcacatttcgtgtggatcgctcctttgcaagtggcactcctcatggggctaatctgggagttgttacaggcgtctgccttctgtggacttggtttcctgatagtccttgccctttttcaggctgggctagggagaatgatgatgaagtacagagatcagagagctgggaagatcagtgaaagacttgtgattacctcagaaatgattgaaaatatccaatctgttaaggcatactgctgggaagaagcaatggaaaaaatgattgaaaacttaagacaaacagaactgaaactgactcggaaggcagcctatgtgagatacttcaatagctcagccttcttcttctcagggttctttgtggtgtttttatctgtgcttccctatgcactaatcaaaggaatcatcctccggaaaatattcaccaccatctcattctgcattgttctgcgcatggcggtcactcggcaatttccctgggctgtacaaacatggtatgactctcttggagcaataaacaaaatacaggatttcttacaaaagcaagaatataagacattggaatataacttaacgactacagaagtagtgatggagaatgtaacagccttctgggaggagggatttggggaattatttgagaaagcaaaacaaaacaataacaatagaaaaacttctaatggtgatgacagcctcttcttcagtaatttctcacttcttggtactcctgtcctgaaagatattaatttcaagatagaaagaggacagttgttggcggttgctggatccactggagcaggcaagacttcacttctaatgatgattatgggagaactggagccttcagagggtaaaattaagcacagtggaagaatttcattctgttctcagttttcctggattatgcctggcaccattaaagaaaatatcatctttggtgtttcctatgatgaatatagatacagaagcgtcatcaaagcatgccaactagaagaggacatctccaagtttgcagagaaagacaatatagttcttggagaaggtggaatcacactgagtggaggtcaacgagcaagaatttctttagcaagagcagtatacaaagatgctgatttgtatttattagactctccttttggatacctagatgttttaacagaaaaagaaatatttgaaagctgtgtctgtaaactgatggctaacaaaactaggattttggtcacttctaaaatggaacatttaaagaaagctgacaaaatattaattttgaatgaaggtagcagctatttttatgggacattttcagaactccaaaatctacagccagactttagctcaaaactcatgggatgtgattctttcgaccaatttagtgcagaaagaagaaattcaatcctaactgagaccttacaccgtttctcattagaaggagatgctcctgtctcctggacagaaacaaaaaaacaatcttttaaacagactggagagtttggggaaaaaaggaagaattctattctcaatccaatcaactctatacgaaaattttccattgtgcaaaagactcccttacaaatgaatggcatcgaagaggattctgatgagcctttagagagaaggctgtccttagtaccagattctgagcagggagaggcgatactgcctcgcatcagcgtgatcagcactggccccacgcttcaggcacgaaggaggcagtctgtcctgaacctgatgacacactcagttaaccaaggtcagaacattcaccgaaagacaacagcatccacacgaaaagtgtcactggcccctcaggcaaacttgactgaactggatatatattcaagaaggttatctcaagaaactggcttggaaataagtgaagaaattaacgaagaagacttaaaggagtgcctttttgatgatatggagagcataccagcagtgactacatggaacacataccttcgatatattactgtccacaagagcttaatttttgtgctaatttggtgcttagtaatttttctggcagaggtggctgcttctttggttgtgctgtggctccttggaaacactcctcttcaagacaaagggaatagtactcatagtagaaataacagctatgcagtgattatcaccagcaccagttcgtattatgtgttttacatttacgtgggagtagccgacactttgcttgctatgggattcttcagaggtctaccactggtgcatactctaatcacagtgtcgaaaattttacaccacaaaatgttacattctgttcttcaagcacctatgtcaaccctcaacacgttgaaagcaggtgggattcttaatagattctccaaagatatagcaattttggatgaccttctgcctcttaccatatttgacttcatccagttgttattaattgtgattggagctatagcagttgtcgcagttttacaaccctacatctttgttgcaacagtgccagtgatagtggcttttattatgttgagagcatatttcctccaaacctcacagcaactcaaacaactggaatctgaaggcaggagtccaattttcactcatcttgttacaagcttaaaaggactatggacacttcgtgccttcggacggcagccttactttgaaactctgttccacaaagctctgaatttacatactgccaactggttcttgtacctgtcaacactgcgctggttccaaatgagaatagaaatgatttttgtcatcttcttcattgctgttaccttcatttccattttaacaacaggagaaggagaaggaagagttggtattatcctgactttagccatgaatatcatgagtacattgcagtgggctgtaaactccagcatagatgtggatagcttgatgcgatctgtgagccgagtctttaagttcattgacatgccaacagaaggtaaacctaccaagtcaaccaaaccatacaagaatggccaactctcgaaagttatgattattgagaattcacacgtgaagaaagatgacatctggccctcagggggccaaatgactgtcaaagatctcacagcaaaatacacagaaggtggaaatgccatattagagaacatttccttctcaataagtcctggccagagggtgggcctcttgggaagaactggatcagggaagagtactttgttatcagcttttttgagactactgaacactgaaggagaaatccagatcgatggtgtgtcttgggattcaataactttgcaacagtggaggaaagcctttggagtgataccacagaaagtatttattttttctggaacatttagaaaaaacttggatccctatgaacagtggagtgatcaagaaatatggaaagttgcagatgaggttgggctcagatctgtgatagaacagtttcctgggaagcttgactttgtccttgtggatgggggctgtgtcctaagccatggccacaagcagttgatgtgcttggctagatctgttctcagtaaggcgaagatcttgctgcttgatgaacccagtgctcatttggatccagtaacataccaaataattagaagaactctaaaacaagcatttgctgattgcacagtaattctctgtgaacacaggatagaagcaatgctggaatgccaacaatttttggtcatagaagagaacaaagtgcggcagtacgattccatccagaaactgctgaacgagaggagcctcttccggcaagccatcagcccctccgacagggtgaagctctttccccaccggaactcaagcaagtgcaagtctaagccccagattgctgctctgaaagaggagacagaagaagaggtgcaagatacaaggctttagagagcagcataaatgttgacatgggacatttgctcatggaattggagctcgtgggacagtcacctcatggaattggagctcgtggaacagttacctctgcctcagaaaacaaggatgaattaagtttttttttaaaaaagaaacatttggtaaggggaattgaggacactgatatgggtcttgataaatggcttcctggcaatagtcaaattgtgtgaaaggtacttcaaatccttgaagatttaccacttgtgttttgcaagccagattttcctgaaaacccttgccatgtgctagtaattggaaaggcagctctaaatgtcaatcagcctagttgatcagcttattgtctagtgaaactcgttaatttgtagtgttggagaagaactgaaatcatacttcttagggttatgattaagtaatgataactggaaacttcagcggtttatataagcttgtattcctttttctctcctctccccatgatgtttagaaacacaactatattgtttgctaagcattccaactatctcatttccaagcaagtattagaataccacaggaaccacaagactgcacatcaaaatatgccccattcaacatctagtgagcagtcaggaaagagaacttccagatcctggaaatcagggttagtattgtccaggtctaccaaaaatctcaatatttcagataatcacaatacatcccttacctgggaaagggctgttataatctttcacaggggacaggatggttcccttgatgaagaagttgatatgccttttcccaactccagaaagtgacaagctcacagacctttgaactagagtttagctggaaaagtatgttagtgcaaattgtcacaggacagcccttctttccacagaagctccaggtagagggtgtgtaagtagataggccatgggcactgtgggtagacacacatgaagtccaagcatttagatgtataggttgatggtggtatgttttcaggctagatgtatgtacttcatgctgtctacactaagagagaatgagagacacactgaagaagcaccaatcatgaattagttttatatgcttctgttttataattttgtgaagcaaaattttttctctaggaaatatttattttaataatgtttcaaacatatattacaatgctgtattttaaaagaatgattatgaattacatttgtataaaataatttttatatttgaaatattgactttttatggcactagtatttttatgaaatattatgttaaaactgggacaggggagaacctagggtgatattaaccaggggccatgaatcaccttttggtctggagggaagccttggggctgatcgagttgttgcccacagctgtatgattcccagccagacacagcctcttagatgcagttctgaagaagatggtaccaccagtctgactgtttccatcaagggtacactgccttctcaactccaaactgactcttaagaagactgcattatatttattactgtaagaaaatatcacttgtcaataaaatccatacatttgtgt

SEQ ID NO: 125 - DNA, 916 bp, Homo sapiens
  misc_feature (13)..(13): n is a, c, g, or t
  misc_feature (15)..(15): n is a, c, g, or t
  misc_feature (58)..(58): n is a, c, g, or t
  misc_feature (130)..(130): n is a, c, g, or t
  misc_feature (153)..(153): n is a, c, g, or t
  misc_feature (201)..(201): n is a, c, g, or t
  misc_feature (216)..(216): n is a, c, g, or t
  misc_feature (308)..(308): n is a, c, g, or t
  misc_feature (319)..(319): n is a, c, g, or t
  misc_feature (346)..(346): n is a, c, g, or t
  misc_feature (370)..(370): n is a, c, g, or t
  misc_feature (378)..(378): n is a, c, g, or t
  misc_feature (413)..(413): n is a, c, g, or t
  misc_feature (473)..(473): n is a, c, g, or t
  misc_feature (491)..(491): n is a, c, g, or t
  misc_feature (503)..(503): n is a, c, g, or t
  misc_feature (523)..(523): n is a, c, g, or t
  misc_feature (527)..(527): n is a, c, g, or t
  misc_feature (535)..(535): n is a, c, g, or t
  misc_feature (541)..(541): n is a, c, g, or t
  misc_feature (581)..(581): n is a, c, g, or t
  misc_feature (586)..(586): n is a, c, g, or t
  misc_feature (596)..(596): n is a, c, g, or t
  misc_feature (603)..(603): n is a, c, g, or t
  misc_feature (619)..(619): n is a, c, g, or t
  misc_feature (624)..(624): n is a, c, g, or t
  misc_feature (634)..(634): n is a, c, g, or t
  misc_feature (643)..(643): n is a, c, g, or t
  misc_feature (668)..(668): n is a, c, g, or t
  misc_feature (670)..(670): n is a, c, g, or t
  misc_feature (674)..(674): n is a, c, g, or t
  misc_feature (686)..(686): n is a, c, g, or t
  misc_feature (693)..(693): n is a, c, g, or t
  misc_feature (700)..(700): n is a, c, g, or t
  misc_feature (718)..(718): n is a, c, g, or t
  misc_feature (727)..(727): n is a, c, g, or t
  misc_feature (737)..(737): n is a, c, g, or t
  misc_feature (746)..(746): n is a, c, g, or t
  misc_feature (757)..(757): n is a, c, g, or t
  misc_feature (761)..(761): n is a, c, g, or t
  misc_feature (766)..(766): n is a, c, g, or t
  misc_feature (768)..(768): n is a, c, g, or t
  misc_feature (779)..(779): n is a, c, g, or t
  misc_feature (781)..(781): n is a, c, g, or t
  misc_feature (789)..(789): n is a, c, g, or t
  misc_feature (792)..(792): n is a, c, g, or t
  misc_feature (797)..(797): n is a, c, g, or t
  misc_feature (800)..(802): n is a, c, g, or t
  misc_feature (818)..(818): n is a, c, g, or t
  misc_feature (829)..(829): n is a, c, g, or t
  misc_feature (836)..(836): n is a, c, g, or t
  misc_feature (843)..(843): n is a, c, g, or t
  misc_feature (861)..(861): n is a, c, g, or t
  misc_feature (870)..(871): n is a, c, g, or t
  misc_feature (874)..(874): n is a, c, g, or t
  misc_feature (881)..(881): n is a, c, g, or t
  misc_feature (888)..(888): n is a, c, g, or t
  misc_feature (890)..(891): n is a, c, g, or t
  misc_feature (895)..(897): n is a, c, g, or t
  misc_feature (904)..(904): n is a, c, g, or t
  misc_feature (913)..(913): n is a, c, g, or t
  misc_feature (916)..(916): n is a, c, g, or t
tttgtccattgcntntaaatgtgtttgaggaacggagagaataaccatccgggacagntgttgccctttctccacacaggagctgggggagccaggtctgcggtccccttagccatctgtcggtcttggnggcagggctgcctgagaaggggntttgggggtttccacatctccccatcttgtccactgacctcctccagnacctgtcccagtcgntccttgcgggaacctcctggggccccaggacggagaccactcccaggctctccacaccctggagccagccctaggcccaccttcctccccgntggggccatgncctccatgcaccccggcccagggtggngccagtccccaacacagacactgnacccaggnacacatgagcatctggtccacgccctccggtgggncctggtccaggtctctcacatccagccccaggtgcccaggtggcaccctccctccctggnctgatggatggtgacttnctccacccaagncaccaccttttccccttctntgcngcctcggnagccgnaaatttgggcacctggtttggggcagtacaggggacccanccagncggacacagnccctganaagctttccaaatgantcccngccatcctgnaggaggganagttttgtgaactgctcgcttccantnttanagtcccaaagancgtcaanacggcanccctggccatggaagggntccacccgngtttcagganaaggaaagncagtttccccntgtncgggntnaaagccccggncngccccagnggnaaggnaannnacggggaccccacccnggtacaaccangttctanaagaacntttgggcccagtcacaanccccctctnngtntaagccntctaaanannggcnnntttcttnttttttccngtn

SEQ ID NO: 126 - DNA, 4012 bp, Homo sapiens
tgggtttttaccagcaacaaaaaatttattgaatgagaagaaccatggtgtcctccacacatctgtagtcctcctcacagaaatgtgtgagcgaagcccagacatgcttgcgcatttcagagagaatgaaaagcttgtgccccaattagttcgtattttaaagaacctcatcatgtccggatattcaccaggacatgatgtttctggtatcagtgacccctttttgcaggtacgaattttgcggttattaagaattttaggacgaaatgatgatgattcaagtgaagctatgaatgatatattagcacaggttgccactaatactgagactagtaaaaatgtaggaaatgctattctttatgaaacggttttgactatcatggatattaagtcagagagtggattgcgagtcctagccataaatatcctgggtcgtttcttattgaacaatgacaagaatattaggtatgtggctctgacatctttgttgaagactgtacagacagatcataatgcagtacagaggcacagaagcacaattgtggactgtcttaaagatttggatgtctcaataaaacggcgtgcaatggaattgagttttgccctggtaaatgggaataatatccgaggcatgatgaaagaattactttattttctggattcgtgtgagccagaatttaaagcagactgtgcatctggaatctttcttgctgcagaaaagtatgcaccttccaaacgatggcatatagacacaattatgcgtgttttgacaacggcaggaagttatgttcgtgatgatgcagtccccaatttaatccagttaataactaatagtgtggagatgcatgcctatactgtccagcgcctgtacaaagcaattcttggtgattattctcaacaacctttggtacaagtggctgcatggtgtataggtgaatatggtgatcttcttgtatctggccagtgtgaagaggaagagcctattcaggtaacagaggatgaagtgttggatattttagaaagtgtcctaatctctaatatgtccacctctgtgacacgaggttatgccctcactgccattatgaagctttccactcgattcacttgtactgtaaaccgaattaagaaagtggtttccatctacggaagcagcattgatgtggaactccagcggagggcagtagaatataatgcacttttcaagaaatatgaccacatgaggtctgccctacttgagagaatgcctgtcatggaaaaagtgaccacaaatggccctactgagattgtgcagacaaatggagagacagaaccagctccactagagaccaaaccgccaccctctgggccacagcccaccagccaggccaatgatttattggatttgttgggaggaaatgacataacacctgttattccaactgcgcctacaagcaaaccatcttctgctggtggagaacttcttgatttgctgggagacatcaaccttacagggtctcactctgtcagccaggctggagtgcagtgggattatctcggctcacttcaacctctgcctcctgcgttcaggtgagcctcctgcctcggcctcctgagtagctgggattataggcgaatgccaccatgcccggctaattttttgtatttttagtagagacggggttttgctgtcttctttaaggggataatgaagagttaaagcacacatgaccttgagtaaaaaatagacataggataacaagttggatggttagctaagctcattcccacaggctgattttttttttcctaatacagtggagtcacagagtataggatttatgtctgtgtcttaacaaaatttcaaaatgttacttgtcatgtacttatgaatcatttacaaatggtcaatttcaaatcctcaaatgtcaaagctgtactggataaccggcaaagaaaaaacaaccccacagttaaaccatagcatatacttcacctaatatgttagtatttccatgttaatatatatagccttcataattataattttaggtgactaatactttatcaacaaatttgctctgtttactcagttcgttagtattgggtagtttggcttttttttttggtttttttgaaacggaatcttgctttgttgcccgggctggagtgcaacagcacgatcgcggctcactgcaacctctgcctcccgggttcaagtgattctcctgcctcagcctcccgagtagctgggatttataggcacgtgccaccatgcccagctaatttttgtatttttttatttgagatggggtttcaccatgttggccaggctggtcttgaactcctgacctcggatgatcctcccgccttggcctcccaaagtgctgggattacaggcatgagtcaccgcacccagccagtatggggtattttgtttctagatttttctacctagcggccccaacaaatattacatcaatttgttcttattttagattaatttgttagactaagtgacttagtctttctgaatctggttaaaattaggatgattaatacttactccataagatatttgtgaggcccattgacctattcagtgcatgatacatagtaggcacttggtaaatattatttaccttttcctcaatttatatgtttaaccgcacagtcataagcattgtatattatcattttaaaaagccctattgggtgaaaatttggtcctattatattttatttttattattatttttttaaattttgtagccctctgccaggcttggtcagcagagagaggccctattattttttgatcacagagcgagactccatctcaaaaaaaaaaaaaaaaaaaaaaattattctgtaccatcacaacttttcacaacgatggcaagccttatgtcttgggagcctgttttgctaggcaaagttacaagtgacctaatgggagctcaaatgtgtgtgtgtctctctgtgtgtttgtgtgtgtgtgtgcactcaagacctctaacagcctcgaagcctggggtggcatcccggccttgccattagcatgcctcatgcatcatcagatgacaaggacaaccctcatgacgaagcaacatgaattagggggcctcttggccttggtccaaaattgtcaatcagaaatgaacataaaggactccagagcagtgggactgtctgtcaaaagactctgtatatcttttgcggatgagttttgtgagagaacagagagaccattgtacctggcacaagggctcttcatgaaaagggagacttactgggaggtgcaagacagtggcatttctcctctcctcttgctgctcagcacagccctggattgcagccccgaggctgagaccagacaaagcccgggaggcagaaagatgctccaagaaccaacactatcaatgtctttgcaaatcctcacaggattcctgtgggtccagctttggaactgggaaacctttcttcggatccgcactcattccactgatgccagctgcccctgaaggatgccagtactgtggtgtgtgagtctcagcagccgcccacacgctcctaactctgctgcatggcagatgcctaggtggaaatagcaaaaacaaggcccgggctggggccagggccagaggggaaggccctggattctcactcatgtgagatcttgaatctctttctttgttctgtttgtttagttagtatcatctggtaaaatagttaaaaaacaacaaaaaactctgtatctgtttctagcatgtgctgcattgactctattaatcacatttcaaattcaccctacattcctctcctcttcactagcctctctgaaggtgtcctggccagccctggagaagcactggtgtctgcagcacccctcagttcctgtgcctcagcccacaggccactgtgataatggtctgtttagcacttctgtatttattgtaagaatgattataatgaagatacacactgtaactgcaagaaattataaatgtttttcacaaaaaaaaaaaaaaaaaaa

SEQ ID NO: 127 - DNA, 1936 bp, Homo sapiens
gacgcgcgccgccgcgcgagggagcgaccagggcagcgcgacgcgggcagagcgagcgccgcggaccccggaggcgagcggccgagggagcccagtcccaacttcgggccccggccccgcgcgccccggcccggccccgcgaggtctcggcgcggaagatggccggcggcgtggacggcccatcgggatcccgttccccgaccacagcagcgacatcctgagtgggctgaacgagcagcggacgcagggcctgctgtgcgacgtggtgatcctggtggagggccgcgagttccccacgcaccgctcggtgctggccgcctgcagccagtacttcaagaagctgttcacgtcgggcgccgtggtggaccagcagaacgtgtacgagatcgacttcgtcagcgccgaggcgctcaccgcgctcatggacttcgcctacacggccacgctcaccgtcagcacagccaacgtgggtgacatcctcagcgccgcccgcctgctggagatccccgccgtgagccacgtgtgcgccgacctcctggaccggcagatcctggcggccgacgcgggcgccgacgccgggcagctggaccttgtagatcaaattgatcagcgcaacctcctccgcgccaaggagtacctcgagttcttccagagcaaccccatgaacagcctgccccccgcggccgccgccgccgctgccagcttcccgtggtccgcctttggggcgtccgatgatgacctggatgccaccaaggaggccgtggccgccgctgtggccgccgtggccgcgggcgactgcaacggcttagacttctatgggccgggccccccggccgagcggcccccgacgggggacggggacgagggcgacagcaacccgggtctgtggccagagcgggatgaggacgcccccaccgggggtctctttccgccgccggtggccccgccggccgccacgcagaacggccactacggccgcggcggagaggaggaggccgcctcgctgtcggaggcggcccccgagccgggcgactctccgggcttcctgtcgggagcggccgagggcgaggacggggacgggcccgacgtggacgggctggcggccagcacgctgctgcagcagatggatgtcatcggtgggccgggcgggggccgcggcgggggacagcgacgaggagtcgcgggccgacgacaagggcgtcatggactactacctgaagtacttcagcggcgcccacgacggcgacgtctacccggcctggtcgcagaaggtggagaagaagatccgagccaaggccttccagaagtgccccatctgcgagaaggtcatccagggcgccggcaagctgccgcgacacatccgcacccacacgggcgagaagccctacgagtgcaacatctgcaaggtccgcttcaccaggcaggacaagctgaaggtgcacatgcggaagcacacgggcgagaagccgtacctgtgccagcagtgcggcgccgcctttgcccacaactacgacctgaagaaccacatgcgcgtgcacacgggcctgcgcccctaccagtgcgacagctgctgcaagaccttcgtccgctccgaccacctgcacagacacctcaagaaagacggctgcaacggcgtcccctcgcgccgcggccgcaagccccgcgtccggggcggggcgcccgaccccagcccgggggccaccgcgacccccggcgcccccgcccagcccagctcccccgacgcccggcgcaacggccaggagaagcactttaaggacgaggacgaggacgaggacgtggccagccccgacggcttgggccggttgaatgtagcgggcgccggtggaggaggtgacagcggaggtggccccggggccgccaccgacggtaacttcacagccggactcgcctaaaaaccaaaaaaaaaaaaaaaaaa

SEQ ID NO: 128 - DNA, 2346 bp, Homo sapiens
ccgccgtcgcccccgcctccccctgcctcagcggctgcccccgccagcgggccgcccgctcccccgggccttgcagcgggccccggcccggctggaggggccccgaccccagctctggtggcgggcagcagcgccgcggcccccttccctcacggggactcggccctgaacgagcaggagaaggagttgcagcggcggctgaagcgtctctacccggccgtggacgaacaagagacgccgctgcctcggtcctggagcccgaaggacaagttcagctacatcggcctctctcagaacaacctgcgggtgcactacaaaggtcatggcaaaaccccaaaagatgccgcgtcagttcgagccacgcatccaataccagcagcctgtgggatttattattttgaagtaaaaattgtcagtaagggaagagatggttacatgggaattggtctttctgctcaaggtgtgaacatgaatagactaccaggttgggataagcattcatatggttaccatggggatgatggacattcgttttgttcttctggaactggacaaccttatggaccaactttcactactggtgatgtcattggctgttgtgttaatcttatcaacaatacctgcttttacaccaagaatggacatagtttaggtattgctttcactgacctaccgccaaatttgtatcctactgtggggcttcaaacaccaggagaagtggtcgatgccaattttgggcaacatcctttcgtgtttgatatagaagactatatgcgggagtggagaaccaaaatccaggcacagatagatcgatttcctatcggagatcgagaaggagaatggcagaccatgatacaaaaaatggtttcatcttatttagtccaccatgggtactgtgccacagcagaggcctttgccagatctacagaccagaccgttctagaagaattagcttccattaagaatagacaaagaattcagaaattggtattagcaggaagaatgggagaagccattgaaacaacacaacagttatacccaagtttacttgaaagaaatcctaatctccttttcacattaaaagtgcgtcagtttatagaaatggtgaatggtacagatagtgaagtacgatgtttgggaggccgaagtccaaagtctcaagacagttatcctgttagtcctcgaccttttagtagtccaagtatgagccccagccatggaatgaatatccacaatttagcatcaggcaaaggaagcaccgcacatttttcaggttttgaaagttgtagtaatggtgtaatatcaaataaagcacatcaatcatattgccatagtaataaacaccagtcatccaacttgaatgtaccagaactaaacagtataaatatgtcaagatcacagcaagttaataacttcaccagtaatgatgtagacatggaaacagatcactactccaatggagttggagaaacttcatccaatggtttcctaaatggtagctctaaacatgaccacgaaatggaagattgtgacaccgaaatggaagttgattcaagtcagttgagacgccagttgtgtggaggaagtcaggccgccatagaaagaatgatccactttggacgagagctgcaagcaatgagtgaacagctaaggagagactgtggcaagaacactgcaaacaaaaaaatgttgaaggatgcattcagtctactagcatattcagatccctggaacagcccagttggaaatcagcttgacccgattcagagagaacctgtgtgctcagctcttaacagtgcaatattagaaacccacaatctgccaaagcaacctccacttgccctagcaatgggacaggccacacaatgtctaggactgatggctcgatcaggaattggatcctgcgcatttgccacagtggaagactacctacattagctatgcatttcaagagctcacacttatattgtggcatatagtcaacatggaagtagaccagctctgctgatttgaaatttagattttttaaattatgtactggggacaggtttttgtcgctttacattgcttcctagtttacagcatgatgcaaatgattttctaacttagtgttaggagaaattattttccatctttaacctcttagttgtctaagagttaaatattactgaatttcagacgttcaaattgatcatcacaaatcctttaaaacaattacctaaaagaaaccaaaaatcctgccttctttgtgggggaggggggagagaggggaaggaaatggaacaagttgtgtttgtgttagcatgtgggtgatgtaaacttcaaattgggagatgttccgacccc

SEQ ID NO: 129 - DNA, 1303 bp, Homo sapiens
aggaggcacagttaatggatctgtaaacttgcaccctctttcagagtggtacatggaagacagcacaaagtggatccatactctgaaatgcagtaactctgatgcttgaatttgttctcccttcttgccagaaaggattctaataactcggtgtcaaagccaagacataaactcaatctcttctcttccaaaagcttcacgttacagcatggaagctgttgccaagtttgatttcactgcttcaggtgaggatgaactgagctttcacactggagatgttttgaagattttaagtaaccaagaggagtggtttaaggcggagcttgggagccaggaaggatatgtgcccaagaatttcatagacatccagtttcccaaatggtttcacgaaggcctctctcgacaccaggcagagaacttactcatgggcaaggaggttggcttcttcatcatccgggccagccagagctccccaggggacttctccatctctgtcaggcatgaggatgacgttcaacacttcaaggtcatgcgagacaacaagggtaattactttctgtggactgagaagtttccatccctaaataagctggtagactactacaggacaaattccatctccagacagaagcagatcttccttagagacagaacccgagaagaccagggtcaccggggcaacagcctggaccggaggtcccagggaggcccacacctcagtggggctgtgggagaagaaatccgaccttcgatgaaccggaagctgtcggatcaccccccgacccttcccctgcagcagcaccagcaccagccacagcctccgcaatatgccccagcgccccagcagctgcagcagcccccacagcagcgatatctgcagcaccaccatttccaccaggaacgccgaggaggcagccttgacataaatgatgggcattgtggcaccggcttgggcagtgaaatgaatgcggccctcatgcatcggagacacacagacccagtgcagctccaggcggcagggcgagtgcggtgggcccgggcgctgtatgactttgaggccctggaggatgacgagctggggttccacagcggggaggtggtggaggtcctggatagctccaacccatcctggtggaccggccgcctgcacaacaagctgggcctcttccctgccaactacgtggcacccatgacccgataaactcttcaggggacagaagctttttgtctggagctgcccacaagaaagagggcaaggaaaaaaggctggactccatgactatatatacatacatctatctac

SEQ ID NO: 130 - DNA, 6453 bp, Homo sapiens
ggatcccagcctttccccagcccgtagccccgggacctccgcggtgggcggcgccgcgctgccggcgcagggagggcctctggtgcaccggcaccgctgagtcgggttctctcgccggcctgttcccgggagagcccggggccctgctcggagatgccgccccgggcccccagacaccggctccctggccttcctcgagcaaccccgagctcggctccggtctccagccaagcccaaccccgagaggccgcggccctactggctccgcctcccgcgttgctcccggaagccccgcccgaccgcggctcctgacagacgggccgctcagccaaccggggtggggcggggcccgatggcgcgcagccaatggtaggccgcgcctggcagacggacgggcgcggggcggggcgtgcgcaggcccgcccgagtctccgccgcccgtgccctgcgcccgcaacccgagccgcacccgccgcggacggagcccatgcgcggggcgaaccgcgcgcccccgcccccgccccgccccggcctcggccccggccctggccccgggggcagtcgcgcctgtgaacggtgagtgcgggcagggatcggccgggccgcgcgccctcctcgcccccaggcggcagcaatacgcgcggcgcgggccgggggcgcggggccggcgggcgtaagcggcggcggcggcggcgggtgggtggggccgggcggggcccgcgggcacaggtgagcgggcgtcgggggctgcggcgggcgggggccccttcctccctggggcctgcgggaatccgggccccacccgtggcctcgcgctgggcacggtccccacgccggcgtacccgggagcctcgggcccggcgccctcacacccgggggcgtctgggaggaggcggccgcggccacggcacgcccgggcacccccgattcagcatcacaggtcgcggaccaggccgggggcctcagccccagtgccttttccctctccgggtctcccgcgccgcttctcggccccttcctgtcgctcagtccctgcttcccaggagctcctctgtcttctccagctttctgtggctgaaagatgcccccggttccccgccgggggtgcggggcgctgcccgggtctgccctcccctcggcggcgcctagtacgcagtaggcgctcagcaaatacttgtcggaggcaccagcgccgcggggcctgcaggctggcactagcctgcccgggcacgccgtggcgcgctccgccgtggccagacctgttctggaggacggtaacctcagccctcgggcgcctccctttagcctttctgccgacccagcagcttctaatttgggtgcgtggttgagagcgctcagctgtcagccctgcctttgagggctgggtcccttttcccatcactgggtcattaagagcaagtgggggcgaggcgacagccctcccgcacgctgggttgcagctgcacaggtaggcacgctgcagtccttgctgcctggcgttggggcccagggaccgctgtgggtttgcccttcagatggccctgccagcagctgccctgtggggcctggggctgggcctgggcctggctgagcagggccctccttggcaggtggggcaggagaccctgtaggaggaccccgggccgcaggcccctgaggagcgatgacggaatataagctggtggtggtgggcgccggcggtgtgggcaagagtgcgctgaccatccagctgatccagaaccattttgtggacgaatacgaccccactatagaggtgagcctagcgccgccgtccaggtgccagcagctgctgcgggcgagcccaggacacagccaggatagggctggctgcagcccctggtcccctgcatggtgctgtggccctgtctcctgcttcctctagaggaggggagtccctcgtctcagcaccccaggagaggagggggcatgaggggcatgagaggtaccagggagaggctggctgtgtgaactccccccacggaaggtcctgagggggtccctgagccctgtcctcctgcaggattcctaccggaagcaggtggtcattgatggggagacgtgcctgttggacatcctggataccgccggccaggaggagtacagcgccatgcgggaccagtacatgcgcaccggggagggcttcctgtgtgtgtttgccatcaacaacaccaagtcttttgaggacatccaccagtacaggtgaaccccgtgaggctggcccgggagcccacgccgcacaggtggggccaggccggctgcgtccaggcaggggcctcctgtcctctctgcgcatgtcctggatgccgctgcgcctgcagcccccgtagccagctctcgctttccacctctcagggagcagatcaaacgggtgaaggactcggatgacgtgcccatggtgctggtggggaacaagtgtgacctggctgcacgcactgtggaatctcggcaggctcaggacctcgcccgaagctacggcatcccctacatcgagacctcggccaagacccggcaggtgaggcagctctccaccccacagctagccagggacccgccccgccccgccccagccagggagcagcactcactgaccctctcccttgacacagggcagccgctctggctctagctccagctccgggaccctctgggaccccccgggacccatgtgacccagcggcccctcgcactgtaggtctcccgggacggcagggcagtgagggaggcgagggccggggtctgggctcacgccctgcagtcctgggccgacacagctccggggaaggcggaggtccttggggagagctgccctgagccaggccggagcggtgaccctggggcccggcccctcttgtccccagagtgtcccacgggcacctgttggttctgagtcttagtggggctactggggacacgggccgtagctgagtcgagagctgggtgcagggtggtcaaaccctggccagacctggagttcaggagggccccgggccaccctgacctttgaggggctgctgtagcatgatgcgggtggccctgggcacttcgagatggccagagtccagcttcccgtgtgtgtggtgggcctggggaagtggctggtggagtcgggagcttcgggccaggcaaggcttgatcccacagcagggagcccctcacccaggcaggcggccacaggccggtccctcctgatcccatccctcctttcccagggagtggaggatgccttctacacgttggtgcgtgagatccggcagcacaagctgcggaagctgaaccctcctgatgagagtggccccggctgcatgagctgcaagtgtgtgctctcctgacgcaggtgagggggactcccagggcggccgccacgcccaccggatgaccccggctccccgcccctgccggtctcctggcctgcggtcagcagcctcccttgtgccccgcccagcacaagctcaggacatggaggtgccggatgcaggaaggaggtgcagacggaaggaggaggaaggaaggacggaagcaaggaaggaaggaagggctgctggagcccagtcaccccgggaccgtgggccgaggtgactgcagaccctcccagggaggctgtgcacagactgtcttgaacatcccaaatgccaccggaaccccagcccttagctcccctcccaggcctctgtgggcccttgtcgggcacagatgggatcacagtaaattattggatggtcttgatcttggttttcggctgagggtgggacacggtgcgcgtgtggcctggcatgaggtatgtcggaacctcaggcctgtccagccctgggctctccatagcctttgggagggggaggttgggagaggccggtcaggggtctgggctgtggtgctctctcctcccgcctgccccagtgtccacggcttctggcagagagctctggacaagcaggcagatcataaggacagagagcttactgtgcttctaccaactaggagggcgtcctggtcctccagagggaggtggtttcaggggttggggatctgtgccggtggctctggtctctgctgggagccttcttggcggtgagaggcatcacctttcctgacttgctcccagcgtgaaatgcacctgccaagaatggcagacatagggaccccgcctcctgggccttcacatgcccagttttcttcggctctgtggcctgaagcggtctgtggaccttggaagtagggctccagcaccgactggcctcaggcctctgcctcattggtggtcgggtagcggccagtagggcgtgggagcctggccatccctgcctcctggagtggacgaggttggcagctggtccgtctgctcctgccccactctcccccgcccctgccctcaccctacccttgccccacgcctgcctcatggctggttgctcttggagcctggtagtgtcactggctcagccttgctgggtatacacaggctctgccacccactctgctccaaggggcttgccctgccttgggccaagttctaggtctggccacagccacagacagctcagtcccctgtgtggtcatcctggcttctgctgggggcccacagcgcccctggtgcccctcccctcccagggcccgggttgaggctgggccaggccctctgggacggggacttgtgccctgtcagggttccctatccctgaggttgggggagagctagcagggcatgccgctggctggccagggctgcagggacactcccccttttgtccagggaataccacactcgcccttctctccagcgaacaccacactcgcccttctctccaggggacgccacactcccccttctgtccaggggacgccacactcccccttctctccaggggacgccacactcgcccttctctccaggggacgccacactcgcccttctctccaggggacgccacactcgcccttctgtccaggggacgccacactcgcccttctctccaggggacgccacactcgcccttctctccaggggacgccacactcccccttctgtccaggggacgccacactcccccttctctccaggggacgccacactcccccttctctccaggggacgccacactcgcccttctctccaggggacgccacactcccccttctgtccaggggacgccacactcgcccttctctccaggggacgccacactcgcccttctctccaggggacgccacactcccccttctctccaggggacgccacactcccccttctctccaggggacgccacactcccccttctgtccaggggacgccacactcgcccttctctccaggggacgccacactcccccttctctccaggggacgccacactcccccttctctccaggggacgccacactcccccttctgtccaggggacgccacactcgcccttctctccaggggacgccacactcgcccttctctccaggggacgccacactcgcccttctctccaggggacgccacacttgcccttctgtccagggaatgccacactcccccttctccccagcagcctccgagtgaccagcttccccatcgatagacttcccgaggccaggagccctctagggctgccgggtgccaccctggctccttccacaccgtgctggtcactgcctgctgggggcgtcagatgcaggtgaccctgtgcaggaggtatctctggacctgcctcttggtcattacggggctgggcagggcctggtatcagggccccgctggggttgcagggctgggcctgtgctgtggtcctggggtgtccaggacagacgtggaggggtcagggcccagcacccctgctccatgctgaactgtgggaagcatccaggtccctgggtggcttcaacaggagttccagcacgggaaccactggacaacctggggtgtgtcctgatctggggacaggccagccacaccccgagtcctagggactccagagagcagcccactgccctgggctccacggaagccccctcatgccgctaggccttggcctcggggacagcccagctaggccagtgtgtggcaggaccaggcccccatgtgggagctgaccccttgggattctggagctgtgctgatgggcaggggagagccagctcctccccttgagggagggtcttgatgcctggggttacccgcagaggcctgggtgccgggacgctccccggtttggctgaaaggaaagcagatgtggtcagcttctccactgagcccatctggtcttcccggggctgggccccatagatctgggtccctgtgtggcccccctggtctgatgccgaggatacccctgcaaactgccaatcccagaggacaagactgggaagtccctgcagggagagcccatccccgcaccctgacccacaagagggactcctgctgcccaccaggcatccctccagggatcc

SEQ ID NO: 131 - DNA, 3868 bp, Homo sapiens
gaattcggcacgagcggccgcgagcagagccgcccagccctgccagctgcgccgggacgataaggagtcaggccagggcgggatgacactcattgattctaaagcatctttaatctgccaggcggagggggctttgctggtctttcttggactattccagagaggacaactgtcatctgggaagtaacaacgcaggatgccccctggggtggactgccccatggaattctggaccaaggaggagaatcagagcgttgtggttgacttcctgctgcccacaggggtctacctgaacttccctgtgtcccgcaatgccaacctcagcaccatcaagcagctgctgtggcaccgcgcccagtatgagccgctcttccacatgctcagtggccccgaggcctatgtgttcacctgcatcaaccagacagcggagcagcaagagctggaggacgagcaacggcgtctgtgtgacgtgcagcccttcctgcccgtcctgcgcctggtggcccgtgagggcgaccgcgtgaagaagctcatcaactcacagatcagcctcctcatcggcaaaggcctccacgagtttgactccttgtgcgacccagaagtgaacgactttcgcgccaagatgtgccaattctgcgaggaggcggccgcccgccggcagcagctgggctgggaggcctggctgcagtacagtttccccctgcagctggagccctcggctcaaacctgggggcctggtaccctgcggctcccgaaccgggcccttctggtcaacgttaagtttgagggcagcgaggagagcttcaccttccaggtgtccaccaaggacgtgccgctggcgctgatggcctgtgccctgcggaagaaggccacagtgttccggcagccgctggtggagcagccggaagactacacgctgcaggtgaacggcaggcatgagtacctgtatggcagctacccgctctgccagttccagtacatctgcagctgcctgcacagtgggttgacccctcacctgaccatggtccattcctcctccatcctcgccatgcgggatgagcagagcaaccctgccccccaggtccagaaaccgcgtgccaaaccacctcccattcctgcgaagaagccttcctctgtgtccctgtggtccctggagcagccgttccgcatcgagctcatccagggcagcaaagtgaacgccgacgagcggatgaagctggtggtgcaggccgggcttttccacggcaacgagatgctgtgcaagacggtgtccagctcggaggtgagcgtgtgctcggagcccgtgtggaagcagcggctggagttcgacatcaacatctgcgacctgccccgcatggcccgtctctgctttgcgctgtacgccgtgatcgagaaagccaagaaggctcgctccaccaagaagaagtccaagaaggcggactgccccattgcctgggccaacctcatgctgtttgactacaaggaccagcttaagaccggggaacgctgcctctacatgtggccctccgtcccagatgagaagggcgagctgctgaaccccacgggcactgtgcgcagtaaccccaacacggatagcgccgctgccctgctcatctgcctgcccgaggtggccccgcaccccgtgtactaccccgccctggagaagatcttggagctggggcgacacagcgagtgtgtgcatgtcaccgaggaggagcagctgcagctgcgggaaatcctggagcggcgggggtctggggagctgtatgagcacgagaaggacctggtgtggaagctgcggcatgaagtccaggagcacttcccggaggcgctagcccggctgctgctggtcaccaagtggaacaagcatgaggatgtggcccagatgctctacctgctgtgctcctggccggagctgcccgtcctgagcgccctggagctgctagacttcagcttccccgattgccacgtaggctccttcgccatcaagtcgctgcggaaactgacggacgatgagctgttccagtacctgctgcagctggtgcaggtgctcaagtacgagtcctacctggactgcgagctgaccaaattcctgctggaccgggccctggccaaccgcaagatcggccacttccttttctggcacctccgctccgagatgcacgtgccgtcggtggccctgcgcttcggcctcatcctggaggcctactgcaggggcaggacccaccacatgaaggtgctgatgaagcagggggaagcactgagcaaactgaaggccctgaatgacttcgtcaagctgagctctcagaagacccccaagccccagaccaaggagctgatgcacttgtgcatgcggcaggaggcctacctagaggccctctcccacctgcagtccccactcgaccccagcaccctgctggctgaagtctgcgtggagcagtgcaccttcatggactccaagatgaagcccctgtggatcatgtacagcaacgaggaggcaggcagcggcggcagcgtgggcatcatctttaagaacggggatgacctccggcaggacatgctgaccctgcagatgatccagctcatggacgtcctgtggaagcaggaggggctggacctgaggatgaccccctatggctgcctccccaccggggaccgcacaggcctcattgaggtggtactccgttcagacaccatcgccaacatccaactcaacaagagcaacatggcagccacagccgccttcaacaaggatgccctgctcaactggctgaagtccaagaacccgggggaggccctggatcgagccattgaggagttcaccctctcctgtgctggctattgtgtggccacatatgtgctgggcattggcgatcggcacagcgacaacatcatgatccgagagagtgggcagctgttccacattgattttggccactttctggggaatttcaagaccaagtttggaatcaaccgcgagcgtgtcccattcatcctcacctacgactttgtccatgtgattcagcaggggaagactaataatagtgagaaatttgaacggttccggggctactgtgaaagggcctacaccatcctgcggcgccacgggcttctcttcctccacctctttgccctgatgcgggcggcaggcctgcctgagctcagctgctccaaagacatccagtatctcaaggactccctggcactggggaaaacagaggaggaggcactgaagcacttccgagtgaagtttaacgaagccctccgtgagagctggaaaaccaaagtgaactggctggcccacaacgtgtccaaagacaacaggcagtagtggctcctcccagccctgggcccaagaggaggcggctgcgggtcgtggggaccaagcacattggtcctaaaggggctgaagagcctgaactgcacctaacgggaaagaaccgacatggctgccttttgtttacactggttatttatttatgacttgaaatagtttaaggagctaaacagccataaacggaaacgcctccttcatgcagcggcggtgctgggccccccgaggctgcacctggctctcggctgaggattgtcaccccaagtcttccagctggtggatctgggcccagcaaagactgttctcctcccgagggaaccttcttcccaggcctcccgccagactgcctgggtcctggcgcctggcggtcacctggtgcctactgtccgacaggatgccttgatcctcgtgcgacccaccctgtgtatcctccctagactgagttctggcagctccccgaggcagccggggtaccctctagattcagggatgcttgctctccacttttcaagtgggtcttgggtacgagaattc

SEQ ID NO: 132 - DNA, 633 bp, Homo sapiens
  misc_feature (170)..(170): n is a, c, g, or t
  misc_feature (262)..(262): n is a, c, g, or t
  misc_feature (314)..(314): n is a, c, g, or t
  misc_feature (384)..(384): n is a, c, g, or t
  misc_feature (404)..(404): n is a, c, g, or t
  misc_feature (422)..(422): n is a, c, g, or t
  misc_feature (427)..(427): n is a, c, g, or t
  misc_feature (509)..(509): n is a, c, g, or t
  misc_feature (520)..(520): n is a, c, g, or t
  misc_feature (528)..(528): n is a, c, g, or t
  misc_feature (538)..(538): n is a, c, g, or t
  misc_feature (578)..(578): n is a, c, g, or t
  misc_feature (605)..(606): n is a, c, g, or t
  misc_feature (612)..(612): n is a, c, g, or t
  misc_feature (617)..(617): n is a, c, g, or t
ttttccgttgcagctgttaatttgcatttaatatttcacaattcctgtaagagaggctagtcaggagggacaccctcaagtttaaatccccacacttacttacttactgctcatccgtcactttcgctaagtgagattaataattcagtagctggtccagaacgcacagnttgggaacgcagaggcccaggcctcatgtaatttcccactcccgtaactgaacgtgctgacccatgttgatgtctgccttcatccaggtggnaaatcagacatgctacgctgcccccttcaaacgagttcctcgtgttaggggnaaaggtcacagccaaactctgccactgacagccagtgccttggcctggatcctctctgtggatgcagggnctacccctcctcagtccagnctcatctactagaccagnttggncattcacttttcggatgtctgtgagcacaggactgcagactgaactctcattcaagttcttccatttggcaaggcccgaggncttttcccggntaaccagncctctcttgnggttgtcttggtcttcctgactcccacccccaccattcanaggaccatcacgaaaaaggggggtggnnttcagnttggnttaaccaggtgagaaa

SEQ ID NO: 133 - DNA, 2691 bp, Homo sapiens
cgccatggagaccaacacccttcccaccgccactcccccttcctctcagggtccctgtcccctccagtgaatcccagaagactctggagagttctgagcagggggcggcactctggcctctgattggtccaaggaaggctggggggcaggacgggaggcgaaacccctggaatattcccgacctggcagcctcatcgagctcggtgattggctcagaagggaaaaggcgggtctccgtgacgacttataaaagcccaggggcaagcggtccggataacggctagcctgaggagctgctgcgacagtccactacctttttcgagagtgactcccgttgtcccaaggcttcccagagcgaacctgtgcggctgcaggcaccggcgcgtcgagtttccggcgtccggaaggaccgagctcttctcgcggatccagtgttccgtttccagcccccaatctcagagccgagccgacagagagcagggaaccgcatggccaaagccgcggcagtcggcatcgacctgggcaccacctactcctgcgtgggggtgttccaacacggcaaggtggagatcatcgccaacgaccagggcaaccgcaccacccccagctacgtggccttcacggacaccgagcggctcatcggggatgcggccaagaaccaggtggcgctgaacccgcagaacaccgtgtttgacgcgaagcgcctgatcggccgcaagttcggcgacccggtggtgcagtcggacatgaagcactggcctttccaggtgatcaacgacggagacaagcccaaggtgcaggtgagctacaagggggagaccaaggcattctaccccgaggagatctcgtccatggtgctgaccaagatgaaggagatcgccgaggcgtacctgggctacccggtgaccaacgcggtgatcaccgtgccggcctacttcaacgactcgcagcgccaggccaccaaggatgcgggtgtgatcgcggggctcaacgtgctgcggatcatcaacgagcccacggccgccgccatcgcctacggcctggacagaacgggcaagggggagcgcaacgtcctgatctttgacctgggcgggggcaccttcgacgtgtccatcctgacgatcgacgacggcatcttcgaggtgaaggccacggccggggacacccacctgggtggggaggactttgacaacaggctggtgaaccacttcgtggaggagttcaagagaaaacacaagaaggacatcagccagaacaagcgagccgtgaggcggctgcgcaccgcctgcgagagggccaagaggaccctgtcgtccagcacccaggccagcctggagatcgactccctgtttgagggcatcgacttctacacgtccatcaccagggcgaggttcgaggagctgtgctccgacctgttccgaagcaccctggagcccgtggagaaggctctgcgcgacgccaagctggacaaggcccagattcacgacctggtcctggtcgggggctccacccgcatccccaaggtgcagaagctgctgcaggacttcttcaacgggcgcgacctgaacaagagcatcaaccccgacgaggctgtgggctacggggcggcggtgcaggcggccatcctgatgggggacaagtccgagaacgtgcaggacctgctgctgctggacgtggctcccctgtcgctggggctggagacggccggaggcgtgatgactgccctgatcaagcgcaactccaccatccccaccaagcagacgcagatcttcaccacctactccgacaaccaacccggggtgctgatccaggtgtacgagggcgagagggccatgacgaaagacaacaatctgttggggcgcttcgagctgagcggcatccctccggccccaggcgtgccccagatcgaggtgaccttcgacatcgatgccaacggcatcctgaacgtcacggccacggacaagagcaccggcaaggccaacaagatcaccatcaccaacgacaagggccgcctgagcaaggaggagatcgagcgcatggtgcaggaggcggagaagtacaaagcggaggacgaggtgcagcgcgagagggtgtcagccaagaacgccctggagtcctacgccttcaacatgaagagcgccgtggaggatgaggggctcaagggcaagatcagcgaggccgacaagaagaaggtgctggacaagtgtcaagaggtcatctcgtggctggacgccaacaccttggccgagaaggacgagtttgagcacaagaggaaggagctggagcaggtgtgtaaccccatcatcagcggactgtaccagggtgccggtggtcccgggcctgggggcttcggggctcagggtcccaagggagggtctgggtcaggccccaccattgaggaggtagattaggggcctttccaagattgctgtttttgttttggagcttcaagactttgcatttcctagtatttctgtttgtcagttctcaatttcctgtgtttgcaatgttgaaattttttggtgaagtactgaacttgcctttttttccggtttctacatgcagagatgaatttatactgccatcttacgactatttcttctttttaatacacttaactcaggccattttttaagttggttacttcaaagtaaataaactttaaaattcaagtgatgcccttttattcct

SEQ ID NO: 134 - DNA, 3558 bp, Homo sapiens
ggaagaagggagcggggtcggagccgtcggggccaaaggagacggggccaggaacaggcagtctcggcccaactgcggacgctccctccaccccctgcgcaaaaagacccaaccggagttgaggcgctgcccctgaaggccccaccttacacttggcgggggccggagccaggctcccaggactgctccagaaccgagggaagctcgggtccctccaagctagccatggtgaggcgccggaggccccggggccccacccccccggcctgaccacactgccctgggtgccctcctccagaagcccgagatgcggggggccgggagacaacactcctggctccccagagaggcgtgggtctggggctgagggccagggcccggatgcccaggttccgggactagggccttggcagccagcgggggtggggaccacgggcacccagagaaggtcctccacacatcccagcgccggctcccggccatggagcccttgaagagcctcttcctcaagagccctctagggtcatggaatggcagtggcagcgggggtggtgggggcggtggaggaggccggcctgaggggtctccaaaggcagcgggttatgccaacccggtgtggacagccctgttcgactacgagcccagtgggcaggatgagctggccctgaggaagggtgaccgtgtggaggtgctgtcccgggacgcagccatctcaggagacgagggctggtgggcgggccaggtgggtggccaggtgggcatcttcccgtccaactatgtgtctcggggtggcggcccgcccccctgcgaggtggccagcttccaggagctgcggctggaggaggtgatcggcattggaggctttggcaaggtgtacaggggcagctggcgaggtgagctggtggctgtgaaggcagctcgccaggaccccgatgaggacatcagtgtgacagccgagagcgttcgccaggaggcccggctcttcgccatgctggcacaccccaacatcattgccctcaaggctgtgtgcctggaggagcccaacctgtgcctggtgatggagtatgcagccggtgggcccctcagccgagctctggccgggcggcgcgtgcctccccatgtgctggtcaactgggctgtgcagattgcccgtgggatgcactacctgcactgcgaggccctggtgcccgtcatccaccgtgatctcaagtccaacaacattttgctgctgcagcccattgagagtgacgacatggagcacaagaccctgaagatcaccgactttggcctggcccgagagtggcacaaaaccacacaaatgagtgccgcgggcacctacgcctggatggctcctgaggttatcaaggcctccaccttctctaagggcagtgacgtctggagttttggggtgctgctgtgggaactgctgaccggggaggtgccataccgtggcattgactgccttgctgtggcctatggcgtagctgttaacaagctcacactgcccatcccatccacctgccccgagcccttcgcacagcttatggccgactgctgggcgcaggacccccaccgcaggcccgacttcgcctccatcctgcagcagttggaggcgctggaggcacaggtcctacgggaaatgccgcgggactccttccattccatgcaggaaggctggaagcgcgagatccagggtctcttcgacgagctgcgagccaaggaaaaggaactactgagccgcgaggaggagctgacgcgagcggcgcgcgagcagcggtcacaggcggagcagctgcggcggcgcgagcacctgctggcccagtgggagctagaggtgttcgagcgcgagctgacgctgctgctgcagcaggtggaccgcgagcgaccgcacgtgcgccgccgccgcgggacattcaagcgcagcaagctccgggcgcgcgacggcggcgagcgtatcagcatgccactcgacttcaagcaccgcatcaccgtgcaggcctcacccggccttgaccggaggagaaacgtcttcgaggtcgggcctggggattcgcccacctttccccggttccgagccatccagttggagcctgcagagccaggccaggcatggggccgccagtccccccgacgtctggaggactcaagcaatggagagcggcgagcatgctgggcttggggtcccagttcccccaagcctggggaagcccagaatgggaggagaaggtcccgcatggacgaagccacatggtacctggattcagatgactcatcccccttaggatctccttccacacccccagcactcaatggtaaccccccgcggcctagcctggagcccgaggagcccaagaggcctgtccccgcagagcgcggtagcagctctgggacgcccaagctgatccagcgggcgctgctgcgcggcaccgccctgctcgcctcgctgggccttggccgcgacctgcagccgccgggaggcccaggacgcgagcgcggggagtccccgacaacaccccccacgccaacgcccgcgccctgcccgaccgagccgcccccttccccgctcatctgcttctcgctcaagacgcccgactccccgcccactcctgcacccctgttgctggacctgggtatccctgtgggccagcggtcagccaagagcccccgacgtgaggaggagccccgcggaggcactgtctcacccccaccggggacatcacgctctgctcctggcaccccaggcaccccacgttcaccacccctgggcctcatcagccgacctcggccctcgccccttcgcagccgcattgatccctggagctttgtgtcagctgggccacggccttctcccctgccatcaccacagcctgcaccccgccgagcaccctggaccttgttcccggactcagaccccttctgggactccccacctgccaaccccttccaggggggcccccaggactgcagggcacagaccaaagacatgggtgcccaggccccgtgggtgccggaagcggggccttgagtgggccaggccactcccccgagctccagctgccttaggaggagtcacagcatacactggaacaggagctgggtcagcctctgcagctgcctcagtttccccagggaccccacccccctttgggggtcaggaacactacactgcacaggaagccttcacactggaagggggacctgcgcccccacatctgaaacctgtaggtccccccagctcacctgccctactggggcccaacactgtacccagctggttgggaggaccagagcctgtctcagggaattgcctgctggggtgatgcagggaggaggggaggtgcagggaagaggggccggcctcagctgtcaccagcacttttgaccaagtcctgctactgcggcccctgccctagggcttagagcatggacctcctgccctgggggtcatctggggccagggctctctggatgccttcctgctgccccagccagggttggagtcttagcctcgggatccagtgaagccagaagccaaataaactcaaaagctgtctcccc

SEQ ID NO: 135 - DNA, 630 bp, Homo sapiens
atggtcgactacctagcaaataagcccaagggtcagaattctttggctttacacaaagtcatcatggtgggcagtggtggcgtgggcaagtcagctctgactctacagttcatgtacgatgagtttgtggaggactatgagcctaccaaagcagacagctatcggaagaaggtagtgctagatggggaggaagtccagatcgatatcttagatacagctgggcaggaggactacgctgcaattagagacaactacttccgaagtggggaggggttcctctgtgttttctctattacagaaatggaatcctttgcagctacagctgacttcagggagcagattttaagagtaaaagaagatgagaatgttccatttctactggttggtaacaaatcagatttagaagataaaagacaggtttctgtagaagaggcaaaaaacagagctgagcagtggaatgttaactacgtggaaacatctgctaaaacacgagctaatgttgacaaggtattttttgatttaatgagagaaattcgagcgagaaagatggaagacagcaaagaaaagaatggaaaaaagaagaggaaaagtttagccaagagaatcagagaaagatgctgcattttataa

SEQ ID NO: 136 - DNA, 1490 bp, Homo sapiens
ggggcagcgcagggcagacggcggcaggagaagcaagatgaatgcaggctcagatcctgtggtcatcgtctcggcggcgcggaccatcataggttccttcaatggtgccttagctgctgttcctgtccaggacctgggctccactgtcatcaaagaagtcttgaagagggccactgtggctccggaagatgtgtctgaggtcatctttggacatgtcttggcagcaggctgtgggcagaatcctgttagacaagccagtgtgggtgcaggaattccctactctgttccagcatggagctgccagatgatctgtgggtcaggcctaaaagctgtgtgccttgcagtccagtcaatagggataggagactccagcattgtggttgcaggaggcatggaaaatatgagcaaggctcctcacttggcttacttgagaacaggagtaaagataggtgagatgccactgactgacagtatactctgtgatggtcttacagatgcatttcacaactgtcatatgggtattacagctgaaaatgtagccacaaaatggcaagtgagtagagaagatcaggacaaggttgcagttctgtcccagaacaggacagagaatgcacagaaagctggccattttgacaaagagattgtaccagttttggtgtcaactagaaaaggtcttattgaagttaaaacagatgagtttcctcgccatgggagcaacatagaagccatgtccaagctaaagccttactttcttactgatggaacgggaacagtcaccccagccaatgcttcaggaataaatgatggtgctgcagctgttgctcttatgaagaagtcagaagctgataaacgtgggcttacacctttagcacggatagtttcctggtcccaagtgggtgtggagccttccattatgggaataggaccaattccagccataaagcaagctgttacaaaagcaggttggtcactggaagatgttgacatatttgaaatcaatgaagcctttgcagctgtctctgctgcaatagttaaagaacttggattaaacccagagaaggtcaatattgaaggaggggctatagccttgggccaccctcttggagcatctggctgtcgaattcttgtgaccctgttacacacactggagagaatgggcagaagtcgtggtgttgcagccctgtgcattgggggtgggatgggaatagcaatgtgtgttcagagagaatgacaatgtgtgttcagagagaatgaattgcttaaactttgaacaacctcaatttctttttaaactaataaagtactaggttgcaatatgtgaaatcagaggaccaaagtacagatggaaaccatttcctacatcacaaaaacccaagtttacagcttgtactttactttaatgtgtaatactcaactcacggtacaagacaattgcatttaacattgttataaataaaaggaacatcagatcaatcattaaaaaaaaaaaa

SEQ ID NO: 137 - DNA, 2833 bp, Homo sapiens
acttgcgctgtcactcagcctggacgcgcttcttcgggtcgcgggtgcactccggcccggctcccgcctcggccccgatggacgccgcgttcctcctcgtcctcgggctgttggcccagagcctctgcctgtctttgggggttcctggatggaggaggcccaccaccctgtacccctggcgccgggcgcctgccctgagccgcgtgcggagggcctgggtcatccccccgatcagcgtatccgagaaccacaagcgtctcccctaccccctggttcagatcaagtcggacaagcagcagctgggcagcgtcatctacagcatccagggacccggcgtggatgaggagccccggggcgtcttctctatcgacaagttcacagggaaggtcttcctcaatgccatgctggaccgcgagaagactgatcgcttcaggctaagagcgtttgccctggacctgggaggatccaccctggaggaccccacggacctggagattgtagttgtggatcagaatgacaaccggccagccttcctgcaggaggcgttcactggccgcgtgctggagggtgcagtcccaggcacctatgtgaccagggcagaggccacagatgccgacgaccccgagacggacaacgcagcgctgcggttctccatcctgcagcagggcagccccgagctcttcagcatcgacgagctcacaggagagatccgcacagtgcaagtggggctggaccgcgaggtggtcgcggtgtacaatctgaccctgcaggtggcggacatgtctggagacggcctcacagccactgcctcagccatcatcacccttgatgacatcaatgacaatgcccccgagttcaccagggatgagttcttcatggaggccatagaggccgtcagcggagtggatgtgggacgcctggaagtggaggacagggacctgccaggctccccaaactgggtggccaggttcaccatcctggaaggcgaccccgatgggcagttcaccatccgcacggaccccaagaccaacgagggtgttctgtccattgtgaaggccctggactatgagagctgtgaacactacgaactcaaagtgtcggtgcagaatgaggccccgctgcaggcggctgcccttagggctgagcggggccaggccaaggtccgcgtgcatgtgcaggacaccaacgagccccccgtgttccaggagaacccacttcggaccagcctagcagagggggcacccccaggcactctggtggccaccttctctgcccgggaccctgacacagagcagctgcagaggctcagctactccaaggactacgacccggaagactggctgcaagtggacgcagccactggccggatccagacccagcacgtgctcagcccggcgtcccccttcctcaagggcggctggtacagagccatcgtcctggcccaggatgacgcctcccagccccgcaccgccaccggcaccctgtccatcgagatcctggaggtgaacgaccatgcacctgtgctggccccgccgccgccgggcagcctgtgcagcgagccacaccaaggcccaggcctcctcctgggcgccacggatgaggacctgcccccccacggggcccccttccacttccagctgagccccaggctcccagagctcggccggaactggagcctcagccaggtcaacgtgagccacgcgcgcctgcggccgcgacaccaggtccccgaaggcctgcaccgcctcagcctgctgctccgggactcggggcagccgccccagcagcgcgagcagcctctgaacgtgaccgtgtgccgctgcggcaaggacggcgtctgcctgccgggggccgcagcgctgctggcggggggcacaggcctcagcctgggcgcactggtcatcgtgctggccagcgccctcctgctgctggtgctggtcctgctcgtggcactccgggcgcggttctggaagcagtctcggggcaaggggctgctgcacggcccccaggacgaccttcgagacaatgtcctcaactacgatgagcaaggaggcggggaggaggaccaggacgcctacgacatcagccagctgcgtcacccgacagcgctgagcctgcctctgggaccgccgccacttcgcagagatgccccgcagggccgcctgcacccccagccaccccgagtgctgcccaccagccccctggacatcgccgacttcatcaatgatggcttggaggctgcagatagtgaccccagtgtgccgccttacgacacagccctcatctatgactacgagggtgacggctcggtggcggggacgctgagctccatcctgtccagccagggcgatgaggaccaggactacgactacctcagagactgggggccccgcttcgcccggctggcagacatgtatgggcacccgtgcgggttggagtacggggccagatgggaccaccaggccagggagggtctttctcctggggcactgctacccagacacagaggccggacagcctgaccctggggcgcaactggacatgccactccccggcctcgtggcagtgatggcccctgcagaggcagcctgaggtcaccgggcccgacccccctgggcctggggcagcctccttcctgtaggcgagggcccaagtctgggggcagaacctgagtgtggatggggcggccaggaagaggccccttcctgccggggtgggaagagtttctctccatcggccccatgcgggtcacctccctagtcccacctttgcctcctaccagtgaacctcatctttgtatgaaagacagcaacctcctgggtaaatctgaatg

SEQ ID NO: 138 - DNA, 6728 bp, Homo sapiens
agcagacgggagtttctcctcggggtcggagcaggaggcacgcggagtgtgaggccacgcatgagcggacgctaaccccctccccagccacaaagagtctacatgtctagggtctagacatgttcagctttgtggacctccggctcctgctcctcttagcggccaccgccctcctgacgcacggccaagaggaaggccaagtcgagggccaagacgaagacatcccaccaatcacctgcgtacagaacggcctcaggtaccatgaccgagacgtgtggaaacccgagccctgccggatctgcgtctgcgacaacggcaaggtgttgtgcgatgacgtgatctgtgacgagaccaagaactgccccggcgccgaagtccccgagggcgagtgctgtcccgtctgccccgacggctcagagtcacccaccgaccaagaaaccaccggcgtcgagggacccaagggagacactggcccccgaggcccaaggggacccgcaggcccccctggccgagatggcatccctggacagcctggacttcccggaccccccggaccccccggacctcccggaccccctggcctcggaggaaactttgctccccagctgtcttatggctatgatgagaaatcaaccggaggaatttccgtgcctggccccatgggtccctctggtcctcgtggtctccctggcccccctggtgcacctggtccccaaggcttccaaggtccccctggtgagcctggcgagcctggagcttcaggtcccatgggtccccgaggtcccccaggtccccctggaaagaatggagatgatggggaagctggaaaacctggtcgtcctggtgagcgtgggcctcctgggcctcagggtgctcgaggattgcccggaacagctggcctccctggaatgaagggacacagaggtttcagtggtttggatggtgccaagggagatgctggtcctgctggtcctaagggtgagcctggcagccctggtgaaaatggagctcctggtcagatgggcccccgtggcctgcctggtgagagaggtcgccctggagcccctggccctgctggtgctcgtggaaatgatggtgctactggtgctgccgggccccctggtcccaccggccccgctggtcctcctggcttccctggtgctgttggtgctaagggtgaagctggtccccaagggccccgaggctctgaaggtccccagggtgtgcgtggtgagcctggcccccctggccctgctggtgctgctggccctgctggaaaccctggtgctgatggacagcctggtgctaaaggtgccaatggtgctcctggtattgctggtgctcctggcttccctggtgcccgaggcccctctggaccccagggccccggcggccctcctggtcccaagggtaacagcggtgaacctggtgctcctggcagcaaaggagacactggtgctaagggagagcctggccctgttggtgttcaaggaccccctggccctgctggagaggaaggaaagcgaggagctcgaggtgaacccggacccactggcctgcccggaccccctggcgagcgtggtggacctggtagccgtggtttccctggcgcagatggtgttgctggtcccaagggtcccgctggtgaacgtggttctcctggccccgctggccccaaaggatctcctggtgaagctggtcgtcccggtgaagctggtctgcctggtgccaagggtctgactggaagccctggcagccctggtcctgatggcaaaactggcccccctggtcccgccggtcaagatggtcgccccggacccccaggcccacctggtgcccgtggtcaggctggtgtgatgggattccctggacctaaaggtgctgctggagagcccggcaaggctggagagcgaggtgttcccggaccccctggcgctgtcggtcctgctggcaaagatggagaggctggagctcagggaccccctggccctgctggtcccgctggcgagagaggtgaacaaggccctgctggctcccccggattccagggtctccctggtcctgctggtcctccaggtgaagcaggcaaacctggtgaacagggtgttcctggagaccttggcgcccctggcccctctggagcaagaggcgagagaggtttccctggcgagcgtggtgtgcaaggtccccctggtcctgctggaccccgaggggccaacggtgctcccggcaacgatggtgctaagggtgatgctggtgcccctggagctcccggtagccagggcgcccctggccttcagggaatgcctggtgaacgtggtgcagctggtcttccagggcctaagggtgacagaggtgatgctggtcccaaaggtgctgatggctctcctggcaaagatggcgtccgtggtctgaccggccccattggtcctcctggccctgctggtgcccctggtgacaagggtgaaagtggtcccagcggccctgctggtcccactggagctcgtggtgcccccggagaccgtggtgagcctggtccccccggccctgctggctttgctggcccccctggtgctgacggccaacctggtgctaaaggcgaacctggtgatgctggtgccaaaggcgatgctggtccccctgggcctgccggacccgctggaccccctggccccattggtaatgttggtgctcctggagccaaaggtgctcgcggcagcgctggtccccctggtgctactggtttccctggtgctgctggccgagtcggtcctcctggcccctctggaaatgctggaccccctggccctcctggtcctgctggcaaagaaggcggcaaaggtccccgtggtgagactggccctgctggacgtcctggtgaagttggtccccctggtccccctggccctgctggcgagaaaggatcccctggtgctgatggtcctgctggtgctcctggtactcccgggcctcaaggtattgctggacagcgtggtgtggtcggcctgcctggtcagagaggagagagaggcttccctggtcttcctggcccctctggtgaacctggcaaacaaggtccctctggagcaagtggtgaacgtggtccccccggtcccatgggcccccctggattggctggaccccctggtgaatctggacgtgagggggctcctgctgccgaaggttcccctggacgagacggttctcctggcgccaagggtgaccgtggtgagaccggccccgctggaccccctggtgctcctggtgctcctggtgcccctggccccgttggccctgctggcaagagtggtgatcgtggtgagactggtcctgctggtcccgccggtcccgtcggccccgtcggcgcccgtggccccgccggaccccaaggcccccgtggtgacaagggtgagacaggcgaacagggcgacagaggcataaagggtcaccgtggcttctctggcctccagggtccccctggccctcctggctctcctggtgaacaaggtccctctggagcctctggtcctgctggtccccgaggtccccctggctctgctggtgctcctggcaaagatggactcaacggtctccctggccccattgggccccctggtcctcgcggtcgcactggtgatgctggtcctgttggtccccccggccctcctggacctcctggtccccctggtcctcccagcgctggtttcgacttcagcttcctgccccagccacctcaagagaaggctcacgatggtggccgctactaccgggctgatgatgccaatgtggttcgtgaccgtgacctcgaggtggacaccaccctcaagagcctgagccagcagatcgagaacatccggagcccagagggaagccgcaagaaccccgcccgcacctgccgtgacctcaagatgtgccactctgactggaagagtggagagtactggattgaccccaaccaaggctgcaacctggatgccatcaaagtcttctgcaacatggagactggtgagacctgcgtgtaccccactcagcccagtgtggcccagaagaactggtacatcagcaagaaccccaaggacaagaggcatgtctggttcggcgagagcatgaccgatggattccagttcgagtatggcggccagggctccgaccctgccgatgtggccatccagctgaccttcctgcgcctgatgtccaccgaggcctcccagaacatcacctaccactgcaagaacagcgtggcctacatggaccagcagactggcaacctcaagaaggccctgctcctcaagggctccaacgagatcgagatccgcgccgagggcaacagccgcttcacctacagcgtcactgtcgatggctgcacgagtcacaccggagcctggggcaagacagtgattgaatacaaaaccaccaagtcctcccgcctgcccatcatcgatgtggcccccttggacgttggtgccccagaccaggaattcggcttcgacgttggccctgtctgcttcctgtaaactccctccatcccaacctggctccctcccacccaaccaactttccccccaacccggaaacagacaagcaacccaaactgaacccccccaaaagccaaaaaatgggagacaatttcacatggactttggaaaatatttttttcctttgcattcatctctcaaacttagtttttatctttgaccaaccgaacatgaccaaaaaccaaaagtgcattcaaccttaccaaaaaaaaaaaaaaaaaaaaaagaataaataaataagtttttaaaaaaggaagcttggtccacttgcttgaagacccatgcgggggtaagtccctttctgcccgttgggttatgaaaccccaatgctgccctttctgctcctttctccacaccccccttggcctcccctccactccttcccaaatctgtctccccagaagacacaggaaacaatgtattgtctgcccagcaatcaaaggcaatgctcaaacacccaagtggcccccaccctcagcccgctcctgcccgcccagcacccccaggccctggggacctggggttctcagactgccaaagaagccttgccatctggcgctcccatggctcttgcaacatctccccttcgtttttgagggggtcatgccgggggagccaccagcccctcactgggttcggaggagagtcaggaagggccacgacaaagcagaaacatcggatttggggaacgcgtgtcatcccttgtgccgcaggctgggcgggagagactgttctgttctgttccttgtgtaactgtgttgctgaaagactacctcgttcttgtcttgatgtgtcaccggggcaactgcctgggggcggggatgggggcagggtggaagcggctccccatttttataccaaaggtgctacatctatgtgatgggtggggtggggagggaatcactggtgctatagaaattgagatgcccccccaggccagcaaatgttcctttttgttcaaagtctatttttattccttgatattttttctttctttttttttttttttgtggatggggacttgtgaatttttctaaaggtgctatttaacatgggaggagagcgtgtgcgctccagcccagcccgctgctcactttccaccctctctccacctgcctctggcttctcaggcctctgctctccgacctctctcctctgaaaccctcctccacagctgcagcccatcctcccggctccctcctagtctgtcctgcgtcctctgtccccgggtttcagagacaacttcccaaagcacaaagcagtttttccctaggggtgggaggaagcaaaagactctgtacctattttgtatgtgtataataatttgagatgtttttaattattttgattgctggaataaagcatgtggaaatgacccaaacataatccgcagtggcctcctaatttccttctttggagttgggggaggggtagacatggggaaggggccttggggtgatgggcttgccttccattcctgccctttccctccccactattctcttctagatccctccataaccccactcccctttctctcacccttcttataccgcaaacctttctacttcctctttcattttctattcttgcaatttccttgcaccttttccaaatcctcttctcccctgcaataccatacaggcaatccacgtgcacaacacacacacacactcttcacatctggggttgtccaaacctcatacccactccccttcaagcccatccactctccaccccctggatgccctgcacttggtggcggtgggatgctcatggatactgggagggtgaggggagtggaacccgtgaggaggacctgggggcctctccttgaactgacatgaagggtcatctggcctctgctcccttctcacccacgctgacctcctgccgaaggagcaacgcaacaggagaggggtctgctgagcctggcgagggtctgggagggaccaggaggaaggcgtgctccctgctcgctgtcctggccctgggggagtgagggagacagacacctgggagagctgtggggaaggcactcgcaccgtgctcttgggaaggaaggagacctggccctgctcaccacggactgggtgcctcgacctcctgaatccccagaacacaacccccctgggctggggtggtctggggaaccatcgtgcccccgcctcccgcctactcctttttaagctt

SEQ ID NO: 139 - DNA, 1144 bp, Homo sapiens
cgactgaggcggcgggcggagcggcaggcggcggcggcgcggcagcggagcgcagcatcatggcggaccgagacagcggcagcgagcagggtggtgcggcgctgggttcgggcggctccctggggcaccccggctcgggctcaggctccggcgggggcggtggtggcggcgggggcggcggcggcagtggcggcggcggcggcggggccccaggggggctgcagcacgagacgcaggagctggcctccaagcgggtggacatccagaacaagcgcttctacctggacgtgaagcagaacgccaagggccgcttcctgaagatcgccgaggtgggcgcgggcggcaacaagagccgccttactctctccatgtcagtggccgtggagttccgcgactacctgggcgacttcatcgagcactacgcgcagctgggccccagccagccgccggacctggcccaggcgcaggacgagccgcgccgggcgctcaaaagcgagttcctggtgcgcgagaaccgcaagtactacatggatctcaaggagaaccagcgcggccgcttcctgcgcatccgccagacggtcaaccgggggcctggcctgggctccacgcagggccagaccattgcgctgcccgcgcaggggctcatcgagttccgtgacgctctggccaagctcatcgacgactacggagtggaggaggagccggccgagctgcccgagggcacctccttgactgtggacaacaagcgcttcttcttcgatgtgggctccaacaagtacggcgtgtttatgcgagtgagcgaggtgaagcccacctatcgcaactccatcaccgtgccctacaaggtgtgggccaagttcggacacaccttctgcaagtactcggaggagatgaagaagattcaagagaagcagagggagaagcgggctgcctgtgagcagcttcaccagcagcaacagcagcagcaggaggagaccgccgctgccactctgctactgcagggtgaggaagaaggggaagaagattgatcaaacagaatgaaacccccacacacacacacatgcatacacacacacacacagccacacacacagaaaatatactgtaaagaaagagagaaaataaaaagttaaaaagttaaaaa

SEQ ID NO: 140 - DNA, 1357 bp, Homo sapiens
atctcaacaacgagttaccaatacttgctcttgattgataaacagaatggggttttggatcttagcaattctcacaattctcatgtattccacagcagcaaagtttagtaaacaatcatggggcctggaaaatgaggctttaattgtaagatgtcctagacaaggaaaacctagttacaccgtggattggtattactcacaaacaaacaaaagtattcccactcaggaaagaaatcgtgtgtttgcctcaggccaacttctgaagtttctaccagctgaagttgctgattctggtatttatacctgtattgtcagaagtcccacattcaataggactggatatgcgaatgtcaccatatataaaaaacaatcagattgcaatgttccagattatttgatgtattcaacagtatctggatcagaaaaaaattccaaaatttattgtcctaccattgacctctacaactggacagcacctcttgagtggtttaagaattgtcaggctcttcaaggatcaaggtacagggcgcacaagtcatttttggtcattgataatgtgatgactgaggacgcaggtgattacacctgtaaatttatacacaatgaaaatggagccaattatagtgtgacggcgaccaggtccttcacggtcaaggatgagcaaggcttttctctgtttccagtaatcggagcccctgcacaaaatgaaataaaggaagtggaaattggaaaaaacgcaaacctaacttgctctgcttgttttggaaaaggcactcagttcttggctgccgtcctgtggcagcttaatggaacaaaaattacagactttggtgaaccaagaattcaacaagaggaagggcaaaatcaaagtttcagcaatgggctggcttgtctagacatggttttaagaatagctgacgtgaaggaagaggatttattgctgcagtacgactgtctggccctgaatttgcatggcttgagaaggcacaccgtaagactaagtaggaaaaatccaagtaaggagtgtttctgagactttgatcacctgaactttctctagcaagtgtaagcagaatggagtgtggttccaagagatccatcaagacaatgggaatggcctgtgccataaaatgtgcttctcttcttcgggatgttgtttgctgtctgatctttgtagactgttcctgtttgctgggagcttctctgctgcttaaattgttcgtcctcccccactccctcctatcgttggtttgtctagaacactcagctgcttctttggtcatccttgttttctaactttatgaactccctctgtgtcactgtatgtgaaaggaaatgcaccaacaaccgaaaactg

SEQ ID NO: 141 - DNA, 450 bp, Homo sapiens
gtgactgtgaggactgtggataacctgctggaggtgtctgcccggcacccccagcgcctggaccgccacggcttcgtgtcccgagagttctgccgcacctatgtcctgcctgctgatgtcgacccctggcgagtccgagctgctctctcccatgatggcatcttaaacctggaagcacctcggggtggccgacatttggacacagaggtcaatgaggtctacatctccctgctccctgcgcctcctgatccagaggaagaggaggaggcagccatagttgagccctgattgccacagacccagcacccagcaaatccctctctacctcccaaggtgatatggccagctgcccaccactccagaggtagcagcatccttgggggaagggaaaggtgcatggtccacaatgtatggtttggtcccatgggacatgtcatagccttggtttag

SEQ ID NO: 142 - DNA, 1685 bp, Homo sapiens
actgtcctttcgtggctcactccctttcctctcgtgccgctcggtcacgcttgtgcccgaaggaggaaacagtgacagacctggagactgcagttctctatccttcacacagctctttcaccatgcctggatcacttcctttgaatgcagaagcttgctggccaaaagatgtgggaattgttgcccttgagatctattttccttctcaatatgttgatcaagcagagttggaaaaatatgatggtgtagatgctggaaagtataccattggcttgggccaggccaagatgggcttctgcacagatagagaagatattaactctctttgcatgactgtggttcagaatcttatggagagaaataacctttcctatgattgcattgggcggctggaagttggaacagagacaatcatcgacaaatcaaagtctgtgaagactaatttgatgcagctgtttgaagagtctgggaatacagatatagaaggaatcgacacaactaatgcatgctatggaggcacagctgctgtcttcaatgctgttaactggattgagtccagctcttgggatggacggtatgccctggtagttgcaggagatattgctgtatatgccacaggaaatgctagacctacaggtggagttggagcagtagctctgctaattgggccaaatgctcctttaatttttgaacgagggcttcgtgggacacatatgcaacatgcctatgatttttacaagcctgatatgctatctgaatatcctatagtagatggaaaactctccatacagtgctacctcagtgcattagaccgctgctattctgtctactgcaaaaagatccatgcccagtggcagaaagaggcaaatgataacgattttaccttgaatgattttggcttcatgatctttcactcaccatattgtaaactggttcagaaatctctagctcggatgttgctgaatgacttccttaatgaccagaatagagataaaaatagtatctatagtggcctgaaggcctttggggatgttaagttagaagacacctactttgatagagatgtggagaaggcatttatgaaggctagctctgaactcttcagtcagaaaacaaaggcatctttacttgtatcaaatcaaaatggaaatatgtacacatcttcagtatatggttcccttgcatctgttctagcacagtactcacctcagcatttagcagggaagagaattggagtgttttcttatggttctggtttggctgccactctgtactctcttaaagtcacacaagatgctacaccggggtctgctcttgataaaataacagcaagtttatgtgatcttaaatcaaggcttgattcaagaactggtgtggcacaagatgtcttcgctgaaaacatgaagctcagagaggacacccatcatttggtcaactatattccccagggttcaatagattcactctttgaaggaacgtggtacttagttagggtggatgaaaagcacagaagaacttacgctcggcgtcccactccaaatgatgacactttggatgaaggagtaggacttgtgcattcaaacatagcaactgagcatattccaagccctgccaagaaagtaccaagactccctgctacagcagcagaacctgaagcagcagttattagtaatggggtatggtaa

SEQ ID NO: 143 - DNA, 1277 bp, Homo sapiens
aagctgcttccctggagacgggcggggaggccaaacttcctgctgaagctctgtggcctcttttggggtgggggcgggggtccaggcagaaagaaactgtctgctgctcaagacccacaggacgcccggaagactaaatgatcactgcccccagtgaatatggtgaagaagctggtgatggcccagaagcggggagagacacgagccctttgcctgggtgtaaccatggtggtgtgtgccgtcatcacctactacatcctggtcacgactgtgctgcccctctaccagaaaagcgtgtggacccaggaatccaagtgccacctgattgagaccaacatcagggaccaggaggagctgaagggcaagaaggtgccccagtacccatgcctgtgggtcaacgtgtcagctgccggcaggtgggctgtgctgtaccacacggaggacactcgggaccagaaccagcagtgctcctacatcccaggcagcgtggacaattaccagacggcccgggccgacgtggagaaggtcagagccaaattccaagagcagcaggtcttctactgcttctccgcacctcgggggaacgaaaccagcgtcctattccagcgcctctacgggccccaggccctcctcttctccctcttctggcccaccttcctgctgaccggtggcctcctcattatcgccatggtgaagagcaaccagtacctgtccatcctggcggcccagaagtagagccatccatccatgccataccacttgtcagggcacaggggactggctgggcccccagggctgctccccacttgcagcacaatgccttctccacctgccctcccactcttccagtccaatccacgctgtcttctgttgcaggactaacctttgagaaatccttttgtgaagtcattgcctgctcaagaatgtacagtggctccccaatgccttggaggccataaggccagccagttctagctctctattacctgtccccactcaactgactcatacctgtttccggctgcatcactatgtgccccacagagaacgatgatcgtcacctctgtgcctgagttctccctgttgtctcaaagcggtacccatcctcccccagaagctgtccccagcgagcctcccttctttgtttgaattctctaataagagcaacagcagctcccatttctagaacacatttacagtattactattttctaggatataaagtgccatatatatttttaattccaatattaataaatgtatgccaaacaacaata

SEQ ID NO: 144 - DNA, 1738 bp, Homo sapiens
gaattccgggggttccggcgctccgcggccccaagcgccctcctttcctccctccgccggccggggttgcgggcgcggggcgccgcgggccatgcgatctcggcgcggcccagcccggccggcggcgccccgcccccgctggagcctggggccccgctgcgccgaggccatgttcccggtgtttccttgcacgctgctggccccccccttccccgtgctgggcctggactcccggggggttggcggcctcatgaactccttcccgccacctcagggtcacgcccagaaccccctgcaggtcggggctgagctccagtcccgcttctttgcctcccagggctgcgcccagagtccattccaggccgcgccggcgcccccgcccacgccccaggccccggcggccgagcccctccaggtggacttgctcccggtgctcgccgccgcccaggagtccgccgcggctgctgcggccgctgccgccgctgctgccgccgtcgctgccgcgcccccggcccctgccgccgcctctacggtggacacagcggccctgaagcagcctccggcgccccctccgccacccccgccagtgtcggcgcccgcggccgaggccgcgccccccgcctccgccgccactatcgccgcggcggcggccaccgccgtcgtagccccaacctcgacggtcgccgtggccccggtcgcgtctgccttggagaagaagacaaagagcaaggggccctacatctgcgctctgtgcgccaaggagttcaagaacggctacaatctccggaggcacgaagccatccacacgggagccaaggccggccgggtcccctcgggtgctatgaagatgccgaccatggtgcccctgagcctcctgagcgtgccccagctgagcggagccggcgggggagggggagaggcgggtgccggcggcggcgctgcagtggccgccggtggcgtggtgaccacgaccgcctcggggaagcgcatccggaagaaccatgcctgcgagatgtgtggcaaggccttccgcgacgtctaccacctgaaccgacacaagctgtcgcactcggacgagaagccctaccagtgcccggtgtgccagcagcgcttcaagcgcaaggaccgcatgagctaccacgtgcgctcacatgacggcgctgtgcacaagccctacaactgctcccactgtggcaagagcttctcccggccggatcacctcaacagtcacgtcagacaagtgcactcaacagaacggcccttcaaatgtgagaaatgtgaggcagctttcgccacgaaggatcggctgcgggcgcacacagtacgacacgaggagaaagtgccatgtcacgtgtgtggcaagatgctgagctcggcttatatttcggaccacatgaaggtgcacagccagggtcctcaccatgtctgtgagctctgcaacaaaggtactggtgaggtttgtccaatggcggcggcagcggcagcagcggcagcagtagcagcccctcccacagctgtgggctccctctcgggggcggagggggtgcctgtgagctctcagccacttccctcccaaccctggtgagctccaagttggttgcgggggagaggggagaatggagtagagtcccttggtacaagctcctctcccccctcttttcccaccaactcctatttccctaccaaccaaggagcctccagaaggaaaggaggaagaaatgttttcttaggggaattc

SEQ ID NO: 145 - DNA, 2797 bp, Homo sapiens
tcccttggccccaggagacaggggttgcagaaagccgagatcgtgccactgcactccatcctgggtgagagagcaagaccctgtctcaacaaaaaatttttaaaaaataaaataaataataatacagcaaaaagatttgctttctcggcttcagtgtgggcggtaactccatcgtgcaatgagaaaggcgaatttcttccagacaccaatcccggaggtcgcttctgttgctaggctcccagaaagcagggttcggacgtcattgggaggcgaggctagagcggggttgtgtgtggcggagggaggcggggctggaggaaacgctcgttgctaaggaacgcagcgctcttcccgctctggagaggcgcgactgggcttgcgcagtgtcgacgccggcgccggcgcgccggggtttgaaaggcccgagcctcgcgcgcttgcgcactttagccagcgcagggcgcaccccgctccctcccactctccctgcccctcggaccccatactctacctcatccttctggccaggcgaagcccacgacgttgacatgccggagatccgcctccgccatgtcgtgtcctgcagcagccaggactcgactcactgtgcagaaaatcttctcaaggcagacacttaccgaaaatggcgggcagccaaggcaggcgagaagaccatctctgtggtcctacagttggagaaggaggagcagatacacagtgtggacattgggaatgatggctcagctttcgtggaggtgctggtgggcagttcagctggaggcgctggggagcaagactatgaggtccttctggtcacctcatctttcatgtccccttccgagagccgcagtggctcaaaccccaaccgcgttcgcatgtttgggcctgacaagctggtccgggcagccgccgagaagcgctgggaccgggtcaaaattgtttgcagccagccctacagcaaggactccccctttggcttgagttttgtacggtttcatagccccccagacaaagatgaggcagaggccccgtcccagaaggtgacagtgaccaagcttggccagttccgtgtgaaggaggaggatgagagcgccaactctctgaggccgggggctctcttcttcagccggatcaacaagacatccccagtcacagccagcgacccggcaggacctagctatgcagctgctaccctccaggcttctagtgctgcctcctcagcctctccagtctccagggccataggcagcacctccaagccccaggagtctcccaaagggaagaggaagttggatttgaaccaagaagaaaagaagacccccagcaaaccaccagcccagctgtcgccatctgttcccaagagacctaaattgccagctccaactcgtaccccagccacagccccagtccctgcccgagcacagggggcagtgacaggcaaaccccgaggagaaggcaccgagcccagacgaccccgagctggcccagaggagctggggaagatccttcagggtgtggtagtggtgctgagtggcttccagaaccccttccgctccgagctgcgagataaggccctagagcttggggccaagtatcggccagactggacccgggacagcacgcacctcatctgtgcctttgccaacacccccaagtacagccaggtcctaggcctgggaggccgcatcgtgcgtaaggagtgggtgctggactgtcaccgcatgcgtcggcggctgccctcccggaggtacctcatggcagggccaggttccagcagtgaggaggatgaggcctctcacagcggtggcagcggagatgaagcccccaagcttcctcagaagcaaccccagaccaaaaccaagcccactcaggcagctggacccagctcaccccagaagcccccaacccctgaagagaccaaagcagcctcaccagtgctccaggaagatatagacattgagggggtacagtcagaaggacaggacaatggggcggaagattctggggacacagaggatgagctgaggagggtggcagagcagaaggaacacagactgccccctggccaggaggagaatggggaagacccgtatgcaggctccacggatgagaacacggacagtgaggaacaccaggagcctcctgatctgccagtccctgagctcccagatttcttccagggcaagcacttctttctttacggggagttccctggggacgagcggcggaaactcatccgatacgtcacagccttcaatggggagctcgaggactatatgagtgaccgggttcagtttgtgatcacagcacaggaatgggatcccagctttgaggaggccctgatggacaacccctccctggcattcgttcgtccccgatggatctacagttgcaatgagaagcagaagttacttcctcaccagctctatggggtggtgccgcaagcctgaagtatgtgctatacacacacacacacacacacacacacacacacacgatgcatttaataaagatgagttggttctcatccaagagtctcccaaaactctaagaggctccctgggacctggggaagaatgctgggcacctccgtcagagatctggtacacaaggaactctttgtctcttctgcttggccccttatccctgtgttggcaagaggcagggaactgggaatctgaccctcagcactgcccctcaactttttctggccctctgagccacacctgtatcttggctgtccctttgtggctggassstgggtacccatgaggcttgtctctctcctgaagcctca

SEQ ID NO: 146 - DNA, 86765 bp, Homo sapiens
gatcaattctgaagccatttctaattctacttcaccagtatttttaaaaccagcttatttattaaagatttacttaagttgaggctgggtgtggtggctcacgcctgtaatcccagcactttgggaggccgaggcaggcggatcatgaggtcaggagatcgagaccatcatggctaacacagtgaaaccccatctctactaaaaatacaaaaaattagcctggtgtggtggcaggcatctgtagtcccagctactcgggaggctgaggcagaagaatggcataagtaaacccgggaggcggagcttgcagtgagccgagatggtgccactgcactccagcctaggggacagagtgagactccgtctcaaaaaaaaaaaaaaaatgatttacttaagtcacttgaagttgaaaaagcacttggtttaaagtctcaattttctaataaagtatttgattaagtgcttttttctttaagccaattaattaaagctcttttatatatttttagtaatgaaacatcatatacatgacacataaatatgtagatgtattagacacgcaggtagaagtagatcttatagattcataaaacctctttttccctattttagacttccaaattcctttcttttcttttttttttttttttggcagcaaagaaagaatttaataatcacagggctagccaagtggtaatgaaatgggaggactgggagggggcctgaacaatccctgaggaggagtagaatagcagacggaacactgagaagtgatttccttgaggatagattttcatgatggaaaggaaatgagaggttctaagaggtggcctagcggcttgtaacctacatggaagaggctatgaaatgatgacagaatagaatgggcctgtgaggctggaaggagatattttccttggtctaagaaccatttgccttgtgtgggaagagattgataggtggaagtttcagtgggggagtaggtgggagtgaccgatgagaaggagaaaaactggccatgagggacagaagttggaatgctagctgcttttttagctaccttatcagcataagtgttgccctgagcgatgggatctgacgccttttgatggcccttgcagtgaatgaatccagcttcctttggaagtaaagtggccttgagaagagtttttattaaagaggcattaatgatggaggacccttgcgtagtgaggaaacctctttcagcccatataacagtatggtggtgcaggatatggaaggcatatttagagtcagtataaatattgacacgtagtccctttgcaagggtgagggtttgagttaaggcaatgagtttgacttgctgagaggtagtggagaggggcagaaagtatatgcatcaggtatgaggaagaaaatagattttggaagttatgagaactgtagagagtgagttgagcatagtttgtgattttgagggcctctaaaagtattaaggcagtggcagctgccgcacacagacatgagggctaggctaaaacagtaaggtcaagttgtttggataaaaaggccacagggcacggtcccagtccttgtgtaagaattttgactgcacagccctgcacttcagctatgtgtaatgaaaaaggctgggatgagttagggagagctagtgtgggagcagcttttagggctgttttttaagaaatggaaaggggagtggggaaagaatttaggatttatggggtcagctaggtttatctagaacagaatgggttgtggagggaggtactgaggataggagagtctatgggtttggcaccacggggtagataggcaagacaatttggttgataaggcgcagatcctgaactaacctgtaagacttgtccagtttttggacaggtaaaatggggaaattgtaaggagtgtttataggctttaaaaggccatgctgtaacaggcgagtgataacaggctttaatgctttgaaagcctgctgtgggatgggatactggtgttgagcagggtaagggtgatcaggttttaatgggatggtaaggggtacgtcatccatcgccaaggagggagtagaggtgtcctatacttgtggattaaggtggggagatacaaagagaggatgtgaaggaggctttgaactggggggaaaggcagcaatgaggtgtggctgtagcccaggaatagtcaggggagtagataatttagttaaaatgtctcgacctaataagggagctgggcaggtggggataactaaaaaggagtgcattaaagaatgttgtccaagttggcaccagagttggggagttttaagaggtttagcagcctggccatcaatacccacaacggttatggaggcaagggaaacaggcccttgaaaagaaggtaatgtgaagtgggtagccttcgtattgattaagaaggggacggacttaccctccactgtaagagttacccaaagcgtctgtgatggtccaggaggcttccgaggtgatcaggcaacgtcagtcttcagccactgagccgagaagatctgggaaggagtcagtcagagccttgggccagttagacagtccagtttccagtggggtcccacacagatgggacacggcttaggaggagtcccagttctgtgggcatcccttggcctagtggccagatttccagcacttgaagcaagatcctgggggaggaagtcctgaaggaatgcctgactgctgtggcttaggcgttttgaagtttttgtgtgctggagatatggctggggtttctcacacagcagaggcaagtaattgcaactctttattattgtacaccttgaaggcgcggttaattaggtcctgttgtggggtttgaggactggaagctcatttttggagctttttctaatgtcgggagcggactgggtaataaaatgcatattgagaataaggcggccttccggcccctctgggtctagggcggtaaagcgtctaagggttgctgctaagcgggccatgacctgggctgggttttcgtctttacctcgggtagtttttaattttgtcataattaaaagctttgtgtgctgcctttttaagcccttcaactaggcaggaaatcatgtaatctcgcctagctatacctggggaatctgcctgatagttcctttgggggtcctctcggggaactgctctgatgccttcctggaggcctggctcatgaagccagcggttgtcagcgtgagactgggctagagaaaaaactctttcccgttcatctggggagagggtggaagtcaggatgacatttaagtcactgcaggttaacttgcaggacagagttagatatcggaattcctgtatatatttagtggggtctgatgagaaagagcccaaacactggctgatttgggaaaagtctgatacagaaaaaggcacatgtacccagactatgccttcagctccagccacttctctaagaggaaattgttgggcaggtgggggagagctagtcgcagaacgaaactgtaaagcagaccgggtgtgaggagaggaagtgataaaaggattatagggtgggggagcagtggctgaggaagagttgggacctggctcggcctagcgagaagcagcctggggaggaggggagaggtcagatgggtctgtagaaaagaaggattcaaaggactcagagcttggggtggagactgaaggaacagacaggagagaaagaagaaagatttgggatgagtcacattgggagcagagactagggagggaccaatgtataaaagattgcctggacgtcaggcaccacagaccatttgcccatttttcaacaaaaattatctagatcttgtaggatagacatatcaaaagtgccattctctggccacttggaactactgttgagtttgtattgtggccaagtggtattgcagaagaaaataaggcattaagttttaggtcaggtgtgagttgaagaggttttaagttcttgagaacacaggctaagggagaagaagggggaatggagggcggaaggttgcccatagtgaaggaggtaagtttaaagagaaaggtagagacacggagaaggagggtggggagcagccctaggctgcaatgtgggtgagcagccaaagcaggcatccccgcaactaacttgccaccaagggaatgtcagtgaatgaccaaggcaggcatccccgcggtgatcagacgccaatggagtgtgggtgaataatcaggcaggcgtccccacaatgattaaacaccaagggaaggctgtcttcctgagtccatgactggcgccagagttttgggtccatggataaaatgtgtctactttgtctctactagagaggaaaaagaactggaattagaaagacagggagattgaagggtagtgagaaaggctagataagagagtgaaaagaccgcttacccaatttgaaattggtgagatgttccttgggctggttggtctgaggacccagggtcataggtggatctcttcatggagtgagggtgaggacaggggactggtctcctgaaggagtccctctgacccgggtcttcggcaccagatgtctgtcacatccgcgtgaagagaacaccaaacaggctttgtgtgagcaacaaggctgtttatttcacctgggtgcaggcgggctgaatccaaaaagagagtcagcaaagggtggtgggattatcattagttcttataggttttgggataggcagtggagttaggagcaatgttttgcaggcagggggtggatctcacaaactacattctcaagggtagggagaattacaaagaaccttcttaagggcgggggagattacaaagaaccttcttaagggtgggggagattacaaagtacattgatcagttagggtgggacagaaacaaatcacaatggtggagtgccatcagttaaggctattttcacttcttttgtggatcttcaagtgcttcaggctatctggatgtatacgtgcaggtcacaggggatatgatggcttagcttgggctcagaggcctgacaattattatgaggctagaccatgtgatgtttttacagtgcacttttttttttaacaaagacatttctctaagtgtctaaaccaaactcttccttgatttaaacacccaagagtaacctctgttgtaataactgttttagtcaaaaaaaatcaggtaacacaatacaaaagcaagcagtttaagatctgagatgaactcgcctgtttacactcttggggttccataaggaaaaacagagatttcttcccgaaagggagtctggcaccttctctgttttctttaaggaatctcaggctgttagaaactattttagattcctcatgaagcagagggtggcaagagaaaggagagacagcagaagtaaatgaagaaaacagaattcagttgactaagaagaaaaaaaaaacctttttctcaaaaaaaaaaaagaaagaacaaaagaaaaaaacaaaacaaggtcctaggagagaaaagaaaaccacaaaggccttttaaatacacacacacacacacacacacacacacacacacacacaccttgaatattagcttttaattaagctgacttttaaacattgagctcctttaaaaaaaaatttggctggacgtggtggctcatgcctgtcatcccagcacttagggaggcctaggcaggcagatcatttgaggtcaggagtttgagaccagcctggccaacatggctgggcatggtggctcatgcctgtcatcccagcactttgggaggccgaggccagcggatcacttgaggagtttgagaccagcatggccaacatggtgaaaccccgtctctactaaacatacaaaaattagttgggatggtggcacatgcctgtaatttcagctactcgggaggctgaggcaagagaatcacttgaacccaggaggcagaggttgcagtgagccaagatcatgccactgcactccagcctgggtgacagaaactctgtctcaaaagacaaaacaaaacaaaaaatttaccaagacagttgtaggtaaagaaaggcatatttattagagaaagtattaaaatatgtttcaaaaaagcaatgggcagaattatcagaggtgtgtgaatcagagcaactccatcttgaataggggctgggtaaaatgaagctgagacctactgggctgcattcccagatgatgaaggcattagtcacaggatgagataggaggtcagcacaagatacaggtcataaagaccttgctgataaaacagtttgcgtaaagaagccaaagccggccaaaacccaccaaaaccaagatggacacgagagtgacctctggtcgtcctcactgctatactaccaccagggccatggcagtttaaaaatgccatggcaacatcaagaagttaccctatatggtctaaaaaggggaggcatgaataatccaccccttttttagcatataatcaagaaataaacataaaaatgggcaatcagcagccctcagggctgctctgcctgtggagtagccattctttcttcctttactttgctaataaacttgctttcactttatggactccccctgaattctttcttgcgtgagatccaataaccgtctcttggggtttggattgggacccctttccagtaacagaatcagcaagagaggaagtgactgcaagaaaacaaaggcttgctggagattttataagctggttcttgggctgcagagtgctacatgtagtactgataatgacaaggttgcagaggagctaacttgcaacatttctgtcagccaaggtgtttgatgataaatggaaccatctgataagcaggaagagtgtgagttgtacattatctgcacagataatgtttgtgtcctgggccacaaagaaaggcagacctattatagcttatctgctttatctctttgctttcccctgatctcgccagcttgtccccttttccctaattaggactccacaaagtgagacagaaacaacaaaaacagaaacaaaaaaacaaaacaaaaaacagttaagcaaaacaaacaaatgatcacacaatttatacaattactgagcactctaattataaggagaaattaagactagctggttgttaatcttaactttagccaagacaaaaacccaattcagctacttaccaaggaatggggctcaaactgaagactgctctctaccatcctagaagcgggaaaaagctcaaactcaccctccctcttggaagagggctgaaactccagaagggggttacctgcccaccatcagcatggaagcaggaaaacttgccttccttgttggaagcaagtaaaactccagaaaagttgtacagcaaaataaacattagatctcaaacaaatttgggtagagaccagggattctctggagggaagggagctcccaggcatcagcaaattgttctattggtttgagtcataaggatagctcaagctagtaccaagcaccaaaaggagatttgtcaaagatcaggggcacttccactcagaatcccttcgtggttaccaaactgtgaacccaaaatatctgagtcaggtctcaatcaatttttctagtttattttgccaaagttaaggacacacccataacacagcctcagaaagacttgatgacatgtacccaaggcagttggggtacagcttgattttatacattttagggagacacgagacatcaatcaatatgtgtaagatgtacattggttcagtctggaaagccaggacaacttgaagttgggggagcaggggcttccaggtcataggtagataagaaacaaaagatttcattattttgaatccttgatcagcctttcactgaatacacaatttagtctggctcagtgaatctgcatttttacataaacaatagggctgaggaagcaatcagatatgcatttgtctcagagggatgacttcctgtcccacacctgtgaaaagaagctatcagtttacattgcccgggtgaaattcaacagaactgttttagagtaaagatcttgaggcccacaaaaaattgctgtgggaaaattgtgagggaggtatgtagctttttttttttttttttaatctttgtagctatcttctttacaaacaaaatgagaggcaggttttcctgacacagttcctagcttgactttccccttggattagtgattttgaggtctgacatttatttacctttcacagatctaaaggtggaatttataatttaaagggatgcagatataaaaatttgaaaaatttgtagtctggccatgtaatagaaaaggaaaaagcattttcaggagaggaatccaagggtgctgtggagcaaccatttgcaagagagatgacttgcaagagagcatgactaaaagttaatcatgctgatagttaaggcaatggggaaaagtccccaaaggcacttcagaagataggtagtctctcccatcacaagctaagaggtccaggaggacagaatggtttttggaggacaggctcagggctctgtgccctgtgctgcctagagatgctgctcccacatcccagccactctggctccagccacagctcaaagaacctcaggtgccactcaggatgctgctctggagtgcacaagccataagtcttatcagctatcacatgttgttaagtctgcaggcacccagaatgcaagagtggtggagaactcttggtggcttccacctagatttcagaggatgcatcagaaagcctaggtgtccaggcagaagcctgctgaaggggcagagctaccacagagagcctctgctaaggtaatgacaatcaggaatgtgagattgcagcccccatagagacctgtattagagcaatgcccagtggagctgtggaagcagggccattgtcctccagaccccagaattatagagccactggcagtgtgcaacctcagcctggaaaagctgtaggcattcaacctaacccatgagtacagccacatggactgagcaaagccatgggagtgaggctgcctgaggcctttgaggtccatccctcacaccagtgtgcctaggatgcagatcatgaagtcaaaggagattgttttggaactttaagatttaatgtctgctctgctgggttctggatttgcataaggtccattacacacacacacctatatatataggtgcagtagcacgatcatagttcattctgtctcccaggctggagtccagtggcaccattatagcttactacatcatcaaattcctgagctcaagcaatcctcccacctcattctcctaagtagctgagactacaggcgcacaccaccacacccagctaatttttaaaatgtttgtagagacctgtctcattatgttgcccaggcatgtctccaactccttgcctcaagcgatcctcccacctcagcctcccaaagtgttgtgattacagttgttcagccactatgcctgggcctgttacccctttcttgggccaatttctcccttttggaatgggaacatgtttacccagtgcctgtacaaccattatatcttgtatgtaaataacttgatttttattttaaaggctcatagctttaaggaacttgacttaagtctcaggtgagactttggacttataagttgatgctagaacaagttaagacttttggagactattgggatggaatgattatattttgtatggaaggacatgagatttggaaggccaggggcagcatgcttctttgtcccaaacatccaaatctgtcgctgtttgtgatcctcaattgatttttagtcagcagtcctttactggaacatcctttacccaaacctcatgttgaaatttgatccccagtgttggaggtggggcttaatggtaactgtttggatcctggaggcagatccttcaccaatggcttggtgccatccttgaagtaacacaacttactctattagttcagtgagagctggttattaaaaagagcttggcacctcacttcccccgttgcttcctctctcaccatgtgatctctgcacatgccagctccacttcatcttccaccacagtggaagcagcctgaagctttcaccagaagcagatgctgcagaaccatgagccaaataaacctcttttccttataaatacccagcctcaggtattccttatagcaacactaaataaactaaggcagacattcattataaataaattaatatgatccttccttccttcctctctctctctttttttctttgacagggtcttgctatgtcacctcccacctcagccccctgagtagctgaactacaggcacacactaccacacctggataatcttttaattttttttgtagatacagggtctcactatgttgcccaggctggtaacaaactcctggcctcaagcaatcctctgcctgagcctctcagagtgctgggactataggtgtgagccactgctcccagccaataatataattttttttttttttttttttgagacggagtcttgctctgtcgctcaggctggagtgtaatggcacagtcttggctcactgcaacttccacttcccaggttcaagcaattctcctgactcagcctcccgagtagctgggattacaggcacccacaaccgcacccagctaatttttgtatttttagtagagatgggatttcaccatcctggccagactggtcttgaactcatgacctcatgatccatccaccttggcctcccaaaatgctgggattacaggtgtgagccaccacacctggcccagccagtaatatactttctacattgaattaataaacatctgtgctctttccctaaaattcatttttttttacctgacagatggtgcagacaaacctgtatttttaaagtgcattaaaatattttctattttttcttctttgaaaatctctcccatgatttgaggaagaaaaaaaaaaaaacctcaaagttttcctgtatgtgatcttcaattgattttgagtcagtagtcctttactgaaaagagcaaagaatctcactctaacagatacatgtatgctctgtccagtaacattttatcccctgggtacagagcttacttagactctaacattttagcagtgctctccagattagctcaactacaaaggaaacatttgacccacagacacctgagaagggaaggtgactgaggaatgggtgttgagggactctgctctcctgcaaatattctgaactatcttcaggatccaagatcctatcttaggatccacttaagacctgcacgcatgaagtcattgtaccatggagcacatccttacagggctgccccaaaaatatgcccaacatagaaactaaaactttgctggttatcagcatcactgaggaatagtatttagacttgacaaagtagaggagctgaatctaagaactgtacttaaagccaagcacccaaaagggctatatcacctgttgatgaggtgaagagaaaaatctgcatactggtaacgtgaaccaacaagaaaaccagtctgtccctggtaatagtaagaatagggaggagagaaacatttgagaaatagacaaaaatggcaaaatggggtggaaaggactaataacattaatcattttccctaatcatttataatcatagccctagtctcatgcagttccagcatttgaatgtacaccatactcagagtctgataaaccccaattcaagaaataagtagaaatacagtcctaggttgatagtgttcccagctgggcacagtggcccacgcctgtaatccctatacttcgggaggccgaggtgggcagatcacttgaggtcaggaattcgagaccagcttgggcaacagagtgaaacgctgtctctactaaaaatacaaaaattagctggatgtggtggcaggcacctgtaatcccagcaactcaggaggctgaggcaggagaattgcttgaactcaggaggcagaggctgcagtgagccgagatagcaccaccgcactctagcctgggagacagagggagactctgtctcaaaaaataaaaattaaaaataaataaataaataaataaataaaagatagtgttccctagcacgcagaagaaaccaagacaaatcatctcaacccagacctctcaggattcccaaagttgaagtttaaccaaatatgaattcctaataaaatatcaaacatacaaggaaacagacaaccatgagcagagtcaagagagactacaaactgaaatgtaagacatacacagactgcagatattaaaattaaaaaaatagtatatgaagtaaatacgtttaaagtgttttaactgaaaggcagagataagcagtatgtaaagcagaaagaagggacatttaggtcaacctggaccttcagggtaagttccctgaggatatgatgcttgagttgggctagaaggacaattaagaattagtcaagataggccgggtgcggtgactcacacctgtaatcccagcactttgggaggctgaggtgggcggatcacaaagtcaggagatcgagaccagcctggctaacatggtgaaaccccgtctctattaaaaatacaaaaaaaaattagccgggcgtggtgatgggcgcctgtcgtcccagctacttgggagactgagtcaggagaatggcgtgaacccgggaggcggagcttgcagtgatcgcaccactgcattccaggtcaggcaacagagtgagactccatctcaaaaaaaataaaaataaaaataattagtcaagatataatgccatcaggatatgaaggaaaaaaaagaattaggtggaaaaaagtggtagggcattccataccaagaaatcaaaatcataagcaaagacatggacacactgaacagcatgggggactcagggaaaacttcaagtgtcctctgttactagagtaataaatgcagagcaggaaagagcaagagaagctgaagaagtagcatatcaggagatagagggctttgtataccatacgtaggaagtatggcctcactgaaggactttaaggaggggaataacatgatcagttttgttttatgtagactgctttgttagtagtgagggaaaaggatttaagatgggcaaagctggaggaacagagatcagctaggatcagctacagatcaactgctgcacaggttacaggagaaatgatgagcgtctgaactaccagggtgtctgtaagggtgggaggagaggcagatttgagaaactgcagctaaaattagcaaaagctggtgattacttttgggaaggatgaaggggaagcagcatagaatggctcctgtgtttcttgcttgggtgactaggtgatattaattgatttggggaatacaacaggaagaccacattgggacagatgataatgccctaaataatgaagatgttaggtctgagtacttatggcgaatcaagcttggagatgcttatcaagcaactggatttatgagattgaagctcatatgagaagtcaatgctgaaataattaactacaaaagtggctaattcacctaaggagagacagaagcacagtgatccaagtgtggaattcagggttaggaaataatctgaaattcatgacaagttttataggtttttaaaaaatgctcataagcaaaatataattatgtatagatattaagcaagtcttacagtatcaaaaattggaaaccatctaaaagtaaaaaaaaatagaatggttaattattacagtatatccactttggaaaaatatcatagtcattaaaaatgatgtttaggccaggcgccagtggctcacacctgtaatcccagcacttagggaggccgaggtgtgctgattgcttgagcccaggagtttgagaccagcctggctaacatggaaaaccccgtctctactaaaaatataaaaattaggctgggtgcggtgactcaagcctgtaatcccagcactttgggaggccaaagcagttggatcacctgaggtcaggagttcgagaccagcctgcacaatatggcaaaaccccgtctctactaaaaatacaaaaattagccgggcattgtggcggacacctgtaatcccagctacttgggaggcagagacaggaaagttgtttgaacccaggaggcagaggttgcagtgagctgagatcatgccactgcactccagcctgggtgacaagagcaagactccatctaaaaaacaaacaaagaaaaaaattatccaggcttggtggtgcatgcctgtaataccagctactcaggaggctgaggcaggagaattgcttgaacctgggaggcgaaggttgcagtgagccagaattgagccattgcactccgccctgggcaacagagcaagactctgcctcaaaaaaaaaaaaaaaaaaaatggttaggaagtttacagagtgtagaaaaggtttataataaaatgttaactgctttcctacctttaaaaaacactacgggctggcctcccaacactttgggaggctgaggcaggtggatcacgaggtcaagagtttgagaccagcctggccaagatggtgaaacctcatctctactaaaaatacaaaaattagccaggtgttgccaggcacggtggctcatgcctgtaatcccagcactttgggaggccgaggcgggcagatcatgaggtcgggagttcaagaccagcctgaccaacatgatgaaaccccgtctctactaaaaatacaaaaattagccgggtgtggtgatgcacgcctgtaatcccagctactcaggaggctgaggcaggagaatcgcttgaaccagggaggcggaggttgcagtaagctgagatcgtgctactgcacagcagcaaaaaaaaaaaaaaaaaaaaaaaattagccatgcaaggtggtgggcacctgtaatcccagctacttgggaggctgaagcaggagaatcgcttgaaccctggcgacggaggttgcagtgagccaagatcgcgccactgcactccagccttggcgacagagcaagactctgtctcaaaaataaaataaaataaaataaaataaacactacatatgatttaaacaatataaaaatatgagtaacaaagtccgagcacagtggctcacgtctgtaatcccaacactgtgggaggctgaggcgggcagatcataaggtcaggagttcgagaccagcctggccaatatggtgaaaccccatctctactaaaaatacaaaaaaactagccaggcgtgatggcgcgcccagctattagggaggccgcagcaggagaatcacttgaacgcgggaggcagaggttgcagtgagccgagattgcaccattgcactccatcctgggcaatagagagactccgtctttaaaaaaaaaaaaaaaagagtaacaaggtctggaaataaatacatcaaattgctatagaaacagcaaatatagaaacttgaggttgatgaaattcttccttctacctttccacattttccaaattcactatataatattataataacggagaaaactttaaaacaaacaacatttcctatcacctctatcaggacatagctagagttcctatcaaacacaggacctgacatacaggagcccctcacaaaacgcagtcatgtgccaatacctagatgtgaaggcagctgctgtagaggctcctgccttctagaagcctgcagtctctcctgtctgccagaagcctcaccatggctcggcctccgagatgccatcctgggccggcagggcaggttcagcttctgcccctcgggactcgatctcacctctggccgctgacactctgacccatgcgacttttcggggctcctacttcccattcccaccagcccaccaggggcactgcggcctcacaactccctcatcccctgggaaacaattcccccaggaccgtgggcattatccctccagcggacgtcggccccacaagcccctcacggaagggcggctccgtgagatctcactgtactgaccagtcctgccactgccaggacgctgggcctctcagacactcgatgagaccggtccaactccaggtggcaactggagctgggttgctgccgggcccttaacactacatccctacggagagggcggaacaggagagaggaatagcagaagggaaaggcagaggggagggtggcgaggaagaacccgcgagttccgatggaggctgtggctgcgcgtcgatgctccaccaggacgctggagaggcggcgcgggtcccacaagcccgaaagcccgggaggtggggcgggtcctgcagcggaaatgcctcttgggcgctccgcccgaatctcggttgtgagcttaaatgctcagctctcatatcaaggaagctaaggcgccttcagcctcctgaggagatacccggggaggccgctgctaggaagcctgagagcgcccactgacggccctgccccaagataggctccgtccctgagcagactgggctgggcctctccaaaaccacgctcacagtttgttcattcactgctgagtcctaaccagatactaagcgccagttgctgacgttagagcagtaaactgggtaccaggttcctgccgtctgaaaggacatatttaagccacaagttacaacgtagtgtggaaagcgctgtgtgggggttggggaagcagtgataagggcactcatcccggcttgggagtcaagggaggtctccagtggggcaccagccacagtagcaggacagaagcagatcggatgtaatggtttttaatgataaaaagttaccatctgatgtcttctggttcctctgagacctgctggctgctgggggtggaggggaaaagaagttgaggaggccgtgatcttggacttcccagcctccagaattatgagaaataaatgcttgttgtttaagccagaaaaaaaaaaaaaagaaagaagaaaaaagattaaatgagataataaatgttagagtataaatgtgttccacatcactgaggagcaaaaaaaaaaacaacacattatttaatttttctaaattaaattaactcgggctcaaaaccccatttactagggtggaaagacaaccaacatcaaccatttattggggcccatttccctctttagcatgttgtacattgacaaaaaaaaaaaaaacttagaaaagagcctctgggccaggtgtagtggctcaggcctgtaatccctgaactttgggaggctgaggcgggaggatcacttgagcccaggagttggagaccagcctgggcaacatagaaagaccccatttctaaaaaatacaaaaataaaataaagaaagagagaaaaaaaaaagagactctggtcttcagtctgtcatggttgctcctgggatgaccattgtctaaatccatatggtccattcaaaggcaggcagattcatagcatctctgccaagtatgcacaccagatctctgcagctcccaagacagagtgctagatgcttagttccaaagccattaaatcagcactccctatcagaagtcatggccaggcatggtgtcctcacgcctataatcccagcactctgggaggctgaggtgggcggatcacctgaggtcagaagttcgagaccagcctggacaacatggtgaaatgccatctctaataaaaatacaaaaattagccaggcatgttggcaggcacctgtaatcccagatacttgggaggctgaagcaggagaatcgcttgaacctggtgggtgaagtttgcaatgagctgagattgccccactgttctacaactttatccaggttctgtgtggaggggaatttaatttagctgggtggttttttttttttggtttggaaacacaaagccactaacaatcccatgagacaggacaggtgtggtggctcatgcttgtaatctcaacactgggaggccaaggcaggtggatcgattaagcccaggagttcgagaccagcctgggcaacattgcaaaacactgtctctacaaaaaaatacaaaaattagccaggtgtggtgtgtgtgtgcctgcagtcccagctacttgggaggctgagatgggagaatcacttgagcctggggggtcaagcatgcagtgggctgagatcatgccactgcattccaccctgggtgacaaagtgagaccctgtcccaaaaaaacaaacaagcaatcacatgagacaagaaatccagtattcctggaagaaaattaagccaagttatctttttatcctactagtcatcccatctggcaaggagtaggagacagaaactggtaaattatcttgccataatgtaaataaacaagcacagaataagtgttgagtattaccttctctgtcttccatcaggactcaatttaccttcttcaactagtggttgcaaattcaaataccacgcagataatataaattagtaaaaataaacaagtggaagaaaacaaaatcataggcacaatgatcaacagcaacgagcccttagtcttggcaataaacttttttttttttttctttaagagacatgatttcactctgttgccctgactggagtgcagtggcatgatcatagctcactgcagccttgaactcctggtctcaagcaatcctcttgccttggccttccaaagtgctgggattacaggtgtgagtagtcaccatacccagtcttggcatttactctaagaacagggtgagaactgcagtgaactggagagcacaagttcattccaaagggagcaattgctacttagctccaaatagcctttactttgtgggaatataagtccagtgttgccagattttaagttggaaatattatgtacgatctactgatttacaatattggctactcattaaagttttttttaaaaaaaaacaccgttggctgccgggcgcggtggctcacacctgtaatcacagcactttgggaggctgaggcaggcagatcacgaggtcaggagattgagaccatcctggctaacacagtgaaaccccgtctctactaaaaatacaaaaaatcagccaggtgcggtggcaggcacctgtagtcccagctactcaggaggctgaggcaggaaaatggcatgaacccaggaggcggagcttgcagtgagccaagatcgcgccactgcactccagcctgggcaatagagcgagactccatctcaaaaaaaacaaaacaaaacaaaaaaaaccaccgttggtcacagttaaaaagcactgtctgggccaaatgttacacataagtaggtcatctttatgcccttcaatggtttcagctgctacatatatgctgctagaggtcaaatctacatcccccccatagactgctctcccaagcttcagatccatgtatctgtcccttgcctagctttaccttgaggtgacaccagaacctcaaattcaaatatctaaaatggaacccatcaccgccccccaaccaccataacttggttcccaggtctttgtttcttatctcagtgaaactgcaccaacaaacatccagtttcccaagtcagaaatcttggagtcaccctcaatttcctctctcccccaacctatcctattggtaaacaagtctaatcaattttatctctggagttctacttgaatccatatttcccatgcccaccatcactgacatggttcaggcctcactttagtttttatttaactaaagcaagactcacctaacctcttgccttttgtgtctttaccctcactagaatgttatttccgagacacaaacttcatcttgtcacttccctgtttaaaacttttcaatggtttcacattgaaaagtgacagagttccaacttcttagcctggtgttcagggactttgtgatcttgtctttctaggttcatctcctaccacttccccaacctccatccaaaactacagccacactgaaataccttcaatttccataatggggcatagtttctctgccctagcacatttacacaggctgttcctactgcctggattgtccttctctcactccctacactacatcctcactttcttggttcctcaaataaagcattaatcatctcctctgggaagcacccctcaccatcaacctccttcttcagactggtgggaatctgttctctggccccataaaactctgtgcgcatctctattttcattacctgttacttcactgatcccccaatgaaatgggacctagtttagtgcaaagactctatcttacttctgcagtttaaagactgagcacaatacctggtccataacaggcattcaacaaatgttacatgaatcaatcaatcaatctagttcaactcatggtaccaatggagaaacctctcttcggtttctcaagatcatgtggtggatcagtgatggagctagagaacccaagtctcctcactttcagctcagcacactttccaccagaacaaatcagcttttaatgaggacagggattgaagcgtggccctgaaaggaagggccgacatggaacaaagtggtggttttagggggaaatggaggaaatgagaatggcaaagcacatttatttgtcatccttaacatgaatgcttcacagttcacagctgacacgagcataaaaaagaggggatagaccccaaccattaaagacagaatgaagcttataattagaaaccttaaatagaaatttaatacagcatacattatattattctaagcatatatatttattcatttaatccttgttagaaatgcttgttccccagtgccgtgaagaaatagcacttgaacataaatttaatttcctcagcaaggctatttttactttctgcagaaacggtacactcaccagcagttttgccatgaagagtacaccgaacaaaggaggcagggtcatttatagcctgacgcatccaccctactgctgtgtccggtttccattggctggaacaggacctcgctttctgtatttgtcctgattggctaacaacttagaactttttaaaaagaggcaaaggcagagaacaaaggaaggaggaagttaacttgtggaatgctgagaaaggtaaaaacaccttcaaataaggaagaggaacaggctatgacctaatgcttgcttggaccaatataagcatgccagggcaaatatttaggctaaattgtggaagctaagaacataaagtaaattgatttattacggctagcagatatttaagaatgttaacagaggtctttgaataaattttgcttctaagagatgttactatttattcctaataagatggagaggaaagtctttgaagaggaacctctactttactttttacatcctcaaaacaaccctgtgtagtaagtaataatattattgtgctgggtagagtggcccatgcctgtaatcccagctactcagaggctgagatggaaggctctcttgagctcaggaggtcaagaccagccggggcaatacaatgagaccttgcctctaagaataatatgccaggcaagatggttcacgcctataatcccaccactttgggaggccaaggcgggaggatccctagagctcaggagtcgagaccagcctgggcaatatagagagatcctgtctctacaaaaataaaaaatataaaaattagctgggcacggtggcacatgcctgtggtcccagctactcaggaggctgaggcaggaggagcacttcagcccaggaggttgaggctgcagtgagtcgtgatcacaccactgcactccagcctgggtgacacagtgagattctgtctcaaaataataacaataaatatctataaaataaagataatgatatctttattttatagataagaaaaatgaggcactgaaaaaattaagtagtttgagttttcacaggtaggaaaatgacagagctatgatttgaataaggcagttcggtgctagaatccatgtacttaaccacaatgcctgaagcataattctgaactgggcaatcaaaaggggatcacccacatttcactgtgtgaagcatgaattgcctgatagaggaaattttttttggttctaaattcagggagaaggctgttaagcccaggcctctgtgggggatgggagttctttgttctgtgatgcaatgatgacctcagggtaaactgccagaaggctaagggaaatggaatggctgctggaggacctgcttggggctaagggggatatggggcttctctggggccaactgacccatgccctagcctgcagacactgcggcagcagctgcttccagagtccaggaaatctggtgacactattcttattcgtggtttggcagattcagagatggtggcagcttgggaggttgcgacagcttcatccctggtgctctgggaatatggtgcaaggcaaggtgggtgacctgtgactgtacagctggatgaatgactgctgacaccacatgtgaggtcattggtatgaatgtgggcccaggtgagtgactataagccctagatgtgaggctgggtgagtaaccactgacactagatttgaagccaggtgagtgaccatggattctagatgtagaatgagggaatactgatctccaaatgaggactgggtaatgaccattaacactagatgaggagctgtgtaggtgactggccacacacgtgggattaggtgagtaactgtccactctggatatggagcagactgagtgcctcatagcaaaccttgtgtatctgaaaaggcttcatgcctgagaatatctttatctacttcccaggaactaccacttctgcaccgtgtggccttccttgatcacctgtgtaagcagaaatcagaagtggaggaagaaggggaagaagaggaagagggggaagacgaggcatctctggatccactgaagccatgttctcctaccaaagaagctcccactggagagcaagccactccagccccaccccagccatcctgtggttctgagggcctcctcaaggctatagggataccagagcaaacagtcatgcagcccgtgagcccttccagatccttccccatcttccagattctgaccagctttcctgtgaggcacaagatagcatcagggaaccgccagcagcagagaaaaagccagctcttctggggtctcccctctctgcacagcgagtccttggaggccatcttcctgagctcaggtggcccctctcctctgaagttgtctgtttgttcttctgtcttcttcaacaagcttgccttcctacctaggtccaacctgttgcttccccagtatcactcctcagcccagttttctacccatggggcccatactatggaagatctagaagggatggcccccgatcctcagctgcttccacctccatcttctccttctgtctcatcactactcctccatctgaggcccttccctgtggaccacaagggagttttatctggcgctgaggcacccacacagtcccctggaactagccccctggaagttctccctggatatgagactcatttggaaaccacaggacacaaaaagatgccccaagcttttgagcctccgatgccacccccctgccaatccccagcttctctgtcagaacccagaaaagttagccctgaaggaggacttgctatatctaaggacttctggggaaccgtgggatacagagagaaacctcaggcctctgagtcttcaatgccagtcccttgccctcccctagactccctgccagaactccagagagagagttccctggaagatccatccagatataagccccagtgggaatgcagagaaaactcaggaaacctctgggcttttgagtctccagtcttggacctcaacccagagctctctggaaccagccctgaatgtgtcccaccagcatctgagacaccatggaagggcatgcaaagtagagaaaatatttgggtccctgcagacccagtttcacctcccagccttccctcagtccctctcctggagtctctagtaatgggcccccagggagtcctgtctgaatccaaagctttgtgggagaccatggggcagaaagagaacctctgggcatctgattccccagaccctgttcatagcacacctccaaccacccttatggaaccacacagaatcaatcctggggaatgcctcgctacatcagaagctacatggaaggatactgagcattccaggaattcctcggcttctaggtctccatctctggccctcagcccacccccagctcttgcaccggagctgctcagagttagatccatgggggtcctgtctgattctgaagctagatgtggggacatacaaaagacaaaaaactcctgggcctctaagcacccagcttgtaacttaccccaagacctgcatggagccagccctctgggagtcttgtctgattctcagtctattgtaggggaaatggagcaaaaagaaaactgtgttcctgtgttcccaggtaggggctccagcccatcctcaaactctgtttcaaagtcccacgtaagtgagcctatcgcagaccaaagcaactataagcctgacggggaggcagtggagcaaagaaagaaccactgggccactgagctcccagcccccagctcactctctactcctctaccagagccacacattgaccttgaacttgtgtggagaaatgtgcaacaaagagaagttccccaaggccccagccctctggcagtggatcccctacacccagtaccccagcctcccaccctagctgaagctgtgaagattgaacgcactcatcctggtctacccaagggagtaacgtgcccaggggttaaggcagaggccccactctcccagagatggactgtcccagagttgctcacccatcctgggatccatgcctggcagtggagtagagagctgaaactcaggctgaagaaactgcggcagagccctgcctccagagcccctggcccaagtcaatcattttgcagctcccctattctgagctccacaattccagacttctggggactcccttcctgcccaccacagcagatttatccccccaatccatgcccccactcttcaagttgtcatcctcaagaagttcagcgcacagtacctcagcctgtccagtcctcccactgtcatcacttccaatcctcttcccagcttcagccacaggagtctggcagggcggaacaagggtctcagagaggggagaaaatgaaggggaagatggtgagccaggtcccatcccaagggccatgtgtacacatggaggctggtgtggactatctatctccaggcccaggagaaccctcaaactctaaggttctggtctcaggcaagagaaaggacaaggcttcagcctcatcctcagccaaaaagagagagcaccctaggaaacccaaagcaggagaccatagaagagggactgcaaggttggggttatccacagtcacagggaagaaccaccctgcccaggccagaagcctagtagaggcccctgtaagcacatttccccaaaggtctcaacacaggggccagagctctcaacacactgctcttccccagctgcttctccccaaagcttcgggtccccaggatcagccagaggcagggcgaagagcaagtgacatcctgacccctcgccactgtaagcactgtccttgggcccacatggagaagtatctctccttccctaccctcaaggcttcccttaccaggggtttgcaaaaggtgttagccaaatgcctggataaccatcgacccctacccaccaaatctagtcagtagagaaaaggctggtaatactagcacttggtatgccaagacctgaagccaaaccagggggaaggtggggatgtggagacaagaaatggaaattctaataaactagctgaattagataaatcccattcatgtcttctttggaatctagggtactgaaaatgtcaattcccaattctgctacagccatagcccctcagtttcaagtcccagtagagcactcaggattctgcaggcttaactcttttgtggatcttcacagatgatcacatctggagtccacacatccctactctatagggtgaggctacagggccaggtcagcatagcccaaagctgcccttgagagggaacgacttcacagcatgtgaacaaaaaactacatccattcacacgagcacaggtcatctgagtctaggcaactgtgcttggtcctgggtattgttctcttcttcatccacttgacctgtaagttctccacgtatctttctgaccatttcttctcagccctctgctcttttctctccctgggtcagctcatccatctccaaggccatgaaaacaagtgtcttttaatacgtctagtaaccgtctggatttctataatcaccgggtcatatcctctacccattttctaatgcactatttgttggacattgtattagtcaatgtattacagttttctactgctgctgtaacaaattaccacaaaacaaatttattttgtcagaagtctgacacggagcctgggtgcagtggctcacatctgtaatcccaacactttgggaggctgagatgggctgatagcatgagcccagaagtttgagaccagcctgggcaacatgacaaaaccctgtctctacaaaaaaaaaaaaaaaaaaaaaaaccacaaaaattagctgggcatggtggtgcatgcctatagtcccagctactgggcaaggtgaggtgggaggatcacctgaaccagagaggtcaaggctacagtgagccactgcaccactacatgccagcctgggcaaaagagaccctgtctcctccccgcaaaaaaagtctgacacatgtctcacagggctaaaatcaaggggttggcaggcctacatccttttctctaggctctgggtaggattcactccttgcctttcccagtttctagaggctgcccacattccttggttactgacccccttcttctatctttaaagctagcaaaggcaagtcaagttcttctcacattgtatcactctgacctcttctgcctccctcttccacttttttttttttttttttttttgagatggagtctcgctctgtctcccaggctggagtgcagtggcacgaactcggctcactgcaagctccgcctcccaggttttatgccgttctcctgcctcagcctcccgagtagctgggactacaggtgtgcaccacctacgccgggctaatttttttgtatttttagtagagacagggtttcaccatgttagccaggatggtctcgaactcctaacctcgtgatccgcccgccttggcctcccaaagtgctgggattacaggcgtgagccattttttttttttttttttttgagacagagtttcactcttatcacccacgctggagtgcaatggcacaatctcggctcactgcaacctctgcctcctgtgttcaagtgattctcctgcctcagcctcctgagtagcttggattacaggcatgcgccaccacgcctggctaattttgtatttttaatagagatggagtttctccatgttggtcaggctggtctcaaactcctgacctcaagtgatccacccgcctcggcctcccaaaaagtgctgggattacagacatgaaccactgcgcccgaccctacctcttccacttttaaggacccttatgattacactggacaaagctgaataatccaggacacccttccaatttaaagtcagttgatagccaggcgcagcagtggctcatgccttaacagtcccagcatttcaggaggccagggcagctggatcgtttgcggccaggagttcaagaccagtctggccaatatggcaaaaccccatctctactaaaaatacaaaaattagcctggcatggtatgtgtgcctgtaatcccagctactccggaggttgaggcaggagaatcgcttgaacccaggaggcggaggttgccaagatcatgtcactgcactccagccttgacgacagagcaagaccctgtctctaaataaataaatgaagtcagttgattagcaaccttaattccacctggaaccttaatgcccctttttccatgtgaaataatatatacataggttccaaggattacgacgtgggcatcttgagggccatgatcctgcctacagagatagtgacccaaactattatgtatgttccaaatattttcttccaatttgtatcttattggctaattttatggtgacttctattgtatcaaagaaaaatttttttatgtagttaaatctaccaacactttacttcatgacttctaaaacattttctcctggcactttgataattttgcatatttatgttttagattaccgatttttatggtatgaggtgataatctaaccttccccaaaatcatgtccaatttaccaataccattttttaaaaatagaatgtcttgagcccattccattaaatatggtgtattgtaaaaacatgagtcatttctaagcatctctaggcttcaggtccccatattcaacagcataccagacattatctcatatttgacttgtccaaaaacgtattttccctttaactttttcctccaacacgcccattcctatcaaaatgcatgacatccacctaaatacttaagctttgactcttccttcctccctgatctaagccatcaccaaatcttgtcagccaggctcagtggctcatgcgtgtaatcccagcactttggcaggccgaggtaggaggatcatttgaggtcaggagatcgataccagcctgggtggtaccccatctctactaaaaacacaaaaattagccgggtgtggtggtgtgcacctgtaatcccagctacttgggaggctgaggcagaagaattgtttgaaccaggaggcggaggttgcagtgagctgagatcatgccactgcactccagcctgggcaatagagcaagactccatctcaaaaaaacaaaacaaaacaaaacaaaacttgtcaattatacctatgaaatgtatttcaaatccatcttcccctctccatttccaccatcactattgtcttagtcattatttctcactaaattggttgctctattccttctaatccatcctgcacatggctacaattctctggagatcaactgccccgatctcttcaacaagtgtcataaaagtttgagtaaaaggctaggggtggtggtacatacttataagcccagctacttgggaggctgaggcaggagaatcccttgagcccaggatgtagtgtgccatgacgattgggaaccgaatgatgctaagtttggcatcaataatggtgaccttccagaagtgggggaccaccagtgcctaagaaggggtgaactggcccaggtgggaaacacagtagataaaattcctgcacagatcagtagcgatatagcacccgtaaatagccactacactcttagcctgagcaacagaacgaaaccctgtctcttatttttcaaagtttgaataaaggaatctaacagatgccaacttgtggacctaggttagatattggtttggtccaaatagctgtgaatgatatttgggtcgcttgggggaaactccgaatatggtatgggtatctagtttggttcttgacctctagaattttgcttttagggacagggtcatgctctgtcacccaggctagggtgcagtggtgtaatcacagctcactgcagcctctaactcctgggcttaagtgatcctcctgcctcagcctcctgagtagctaggactacagctgtgtaccaccatgcccagcaaacttttttttttattttttgtagaaatgaggactcactcttgttgcccagactggtctcaaactcccggcctcaaccaatcctcctgtctcgacctctcaaagtgctgggattataggcatgagccaccatcaccacgctcaaccaagaacatttacataaagggaaaggtaaagatactgaccaaggccgggcacggtggctcacatctgtaatcccagcactttgggaggccgaggcggtggtggatcacgaggtcagcagatcgagaccatcctggctaacatggtgaaaccctgtctctaccaaaaatacaaaaaaattagccgggcttggtggtgggtgcctgtagtcccagctactagggaggctgaggcaggagaatggcgtgaacccaagaggtggagcttgcagtgagccgagatctcaccactggactctagcctgggcaacacagcaagactccatctcaaaaaaaaaaaaaaaaagatactgaccaaaacgaaaaagttataatgcagtatgatctcaatttgggtttaaaaataccacatgtatagacacgtacacatacacaaaaaagatccagaaacatatgcactaaagttattaaaacagtgatgacctctggttattggaaatatttttttaattttgcttatatttttaccaatttctttcttagacagggtctcattctgtcacccaggctgaagtgcagtggtaagatcactgttcactgtggcctctacctcctgagctcaagtgatcttcctacctcagcctcccaagtagctaggactaccagcacacacaaccatacccagctaatttttgtattttttgtagagatgaggtcttaccaagttgcccagtctggtctcaaactcccaagctaaagcgatctgcttgccttggcctcccaaaatgctgggattaccagtgtgagccaccacgccctggcctatttttctaaatttctacaatgcacattactgcttctataaaaataaaaggttatttaatgtaaagtgtctacgcataaccacgtacatgtgattgacaatattgtactgtacacttggaaaccgttggatgaattatttggatttttttttttttgccacaagaaataaattgaattatttaacgctgaagcctatgtcactttcttgcctgaatcctccagatgacccacacctgtaagaaagttcagtcctggcatttgagggtcttcacaacatggttcctgatctctccaaatttaccccaggactcttgttgctagtctaactttaagctttatgagcaagtgctgtactttctgacctgtgcctcaaactgttctcctccacttctccacatcaagtttcccaccttcctttaaggcccagaaaccgtattttacatggcattgccttccttgcagccccattaacactgtgtgccttgttgatagcttctgtttcctgatagtaaggctttaacatgaggttctctgaggtcaagctcaaattctcaatccagtgctctttccactctatcatattccctctactctgtatatttggttgagaatcagccagtcagaaggtacatgctgcttccttgattcctctcactagtgtcactgttctgttccaaagctttatttagctcaaacctgtcaacagggtctgagtccaaaactcaccacctgctggccaagggtggaactaaaggtacttttccctctcccactactatggtctccaaagacaatgcaattctgaatttccattttacatgggaacgtgagttcacacttatctgagtagctttataaaaaaaaaaatccaaatcctatattaagtattttaaagctcctagtgggttgtggggctgagcaagggttagcaaaccatttgacacttgccacagttcagctgaaatggaagacctgcatccttcacgggcattgtgtccactgaactttcaggggaatttgtaggatcagtaccttagatcgatctatctagatatatatagatagatcgattttttttttttttttttgagacggagtctccatctgtcgcccaggctcactgcaagctccgcctcccgggttcatgccattctcctgcctcagcctcccgagtagctgggactacaggtgcctgccaccacccagctaattttttgtatttttagtgtagacggggtttcactgtgttagccaggatggtctcgatcttctgacctcgtgatccacccgcctcagcctcccaaagtgctgggattacagacgtgagccaccgcgcctggccaaatataaacatagtttaagacattagatatgttgttccatctttgtttttgcctctatggcatactgctggtcctctatttgataccacattcttggtctgaaacccaacctctaatcgcagtgtttaccctatataaagtgatcagctacggtaagatcacattccagtttctttctaggtataatgtgaggggaaagatggactgcctatacaatttgcctcttggtttaagtatgcaggcttccacagtttagaaagcatttttcaatcattttgtcagactaagaaacttgaggccccaaaagagctatcaccttgttcacagctatacaggtataactggcaactcacatgtagaagaatgaaactggatcctcatctcttaccttatacaaaaatcaactcgaggcctggtgcagcagctcatgcctgaaatcccagcactttgggaggctgaggtgggtggatcatctgaggtcaggagtttgagaccagcctggccaacatgggtgaaaccccatctctactaaaaatacaaaaattagccagaggtgtggtggtgcatgcctgcaatcccagctacttgggaggcttgaagcaggagaatcacttgagcccgggaggcagaagttgcgctgagctgagatggagtactctgaggctgggcaacaaagggagactccgtctcaaaaaaaaaaaaaaatcaactccagatggttcaaagacttaagtctaaaacctgaaaccataaaaattctagaatatcagaaaaacccttctagacattggcttaagcaaagacttcatgacccaagaacccaaaagtaaatgcaacaaaaacaaagataaatagatgggacttaattaaaaagcttctgcacagcaaaagaaacagtcagcagagtaaaaagacaacccatggagtgggagaaaatctttgcaacctatacacccaacaaaagactaacatccaggatctacaaggaactgaaacaaatcagcaagaaaaaaacagtcccatcaaaaagtgctctaaggacatgaatagacaattctcaaaagaagatatacaaatggccaacaaacatattaaaaaatgctcaacatcaccaacgatcacggaaatgcaaatcaaacccacaatgtgataacaccttactcctgtaagaatggccataatcaaaaaatcaaaaaataaaagatgttggcgtggatgtggtgatcaggaacactttacactgctggtgggaatgtaaactagtacaaccactatggaaaacagtgtggagattccttaaagaactaaaagtagcactaccatttgatccagcagtcccactactggatatctacccagaggaaaagaaatcattatatgaaaaagatacttgtaaacgcacgtttatagcagcacaatttgcaactgcaaaactaatggaaccagcccgaatgcccatcaatgagtggataaataaattgaattgtggtatacctgaggtcaggagttcaagactagcctggccaatatggtgaagccccatctctactaaaaatacaaaaactagctgggcgtggtggcgtgtgcctgtaatcccagctacatgggaggctgaggcaggaggacggcttgaactagggaggcagaggttgcagtgagctgagattatgccactgcactccagcctgggagacaacgggagactccatctcaaaaaaaaaaaaaaaaagaaagaaattgtggtatatatacatccagggaatactactcagccataagaaggaacgaaataatggcatttgcagcaactggaataccattattctaagtgaactcactcaggaatggaaaaccaaacatcatacgttctcactcgtacatgggagctaagctatgagaatgcaaaggcgtaagaatgatacaacggactctggggactcagggaaaaggtgggggggcggtgagggataaaagactacacattgggtacggtgtacaccgctcagatgacaggtgcaccaaaatcttagaaatcaccactaaagaacttattcatgtaaccaaccaccacctgttccctaaaaacctcctgaaataacaaataccaaaagtgcaaaaatacccatttcacagcatgagttccagagctgctccagtttagtcaaccagtgtaagtatcatgcatccttgaagattatctatgtagaccaaaacggagcctggtcttgcctagcataaagtctaggatgactaataccagtgttgatcataatcctgaaggacacaatcccaaacaccataaccccaaatgttgaagtcccaaaagatcaaaatccttaaaatcacaacctggacaaaataaaatttcaaattctggggaaaggattagtatgtttttcattgtaaacaagacagttgcatcatgttatacagaagtattaccttgttattgtcttaagtatggtttagacacataagggtgccaagttgccaatgagcagaattgtggacttaattttaggtgtcaattttactggattaaggagtatttagaaacctggtaaagcattatctgggtgtgtctgtgaggttgtttccggggattagtttgtaagtctgagtggactgagtggggaagatctgccttcaatgttggtgggtaccatccaacaggcgggggcccagagagaacaaatacagaaggcaaattggtctctaagaggtaggatagatttttcttcttttttaagattgagttttgctcttgttgcccaggctggagtgcaatggctccatctcagctcacgacaacctccgcctcccgggttcaagctattctctgcctcagcctcccaagtagctgggagtacaggcaagcgccaccacgcctggctaattttgtatttgtagtagagatggggtttctccattttggtcaggctggtcttgagctcccgacctcaggtgatctgcccgcctcagcatcccaaagtgctgggattacaggcatgagccaccatgcccagcctaggacagatttttcttctggtgccttggacattaaaaatttgactccatgaccgcaatgttgactctgtgtgtaagcattatatgtgtgcataaaaatgttgaaagttcctcaataaacgaagagacatctgttttttgtacacgtgcatttgtgaaggataaaatttctcaagacctcgtctctttgggagacaatgcagtggtaacgcaacagtttttgaaccatctcatcaagacttaggttttctgtcacagtattacagatgaccagttatataaagctaggtgcccacaattaccaagcatagtgacaaagcatttatacatttcactttttgacctatttctttatgaatgtttcatctgctcatcaccgttatatccgtgcaactgtcattggtatacctgagtgtttatcttgcaaaaatgttactattccctattttatcgtgcagtggcctatgaaacgttctgttgtgttgtttctcaaataaatacgcttttaaaaatgtaagtaaattttcgaagaatgtttagtatttcttccagaattgtattttgggattttgaccttttgggattgtgattttcagaattttagactttagggattttgatctttggagattacagtattttattcaaaattacggtgttcaggactgtcttttgagattatgtcccaaagccaatcaacatatatttaatttagtaatttattttctctgcactactctctctctgggtaaggcatcactgtactgaccctagaagcactaagtgattactgttgaagaggatagtctattttctgtttggaaaaaaaaaaaaattcaatactaaaattttatattaacaaaaagttttttttttttaatcaaagtacataaaataaaggtggacacaactgtaagtgatcaccaaccaggggatgtttgggatttttagatgcattaaaagagagtatagagaatatccacctgcaagtaagattgtattcttttgcaaccctgcgattttcaaatggcaccccaacacagtctttggtcaggataagggatcctgcaggcctagccttaccgtccacatcaaatataggtggagggatgccatattctccacatttggagctctgtcaggctgctccctttccaccagtcctatccagtgatactgcagacaaagggtgaggcaacaggagacatcataccgatgttgatcaggagaggaagaaggtgcaatcttacttccaggatttcacatttggaagaatgccttgggagtggtgggtagcccaaggctgttcccaggaaaagaagcaggcacagggcccaggactcaggctccattttgacccaacgtttattgtccttttacaacatgtcattttttggtttagaaactgcttgtgattagttttccaacattaactcaaaagcatgtaaaataaatcaacctactctctatataaacatccagcaactgtggcccctacccacctacccaggttggatagggggaagggagggctcgggcagcattgagtcaagtgcagatgctttactgtggcaggtggcagtagtgccttggttcacaccccacacaggtcccctgcactgccccaaactacaacagaaatggcataggcccaaggcccaattccctgttggtaattcactctccgcctaccaaatgaaaatcgcttttattttatcgcttttgttttgtatttttgcaacagaaaccccctgtccagagtcagactgtagctgaactgttcagactggagaatggagcaggctgtgggcgcacccctggtccctctcctgggcaagcgcccccacccccagggaacaaggtccaggcaggccagctcactgcacgctggccaccaccacttagccatacaggtcatcatcattgtcttctgtgtatacactgccacctgtgccgcctccactgccctgactggggccagctccaccctggttccctgaagggaatctgtgtacaagagcaaagccaaaaaagagggttaggacagggcctgtgtaagatttccacaactacccctctagcttccttaggactcccatcccttttggtgtaggtccccaaagtaacttaagcactgtctaatgctcccaaccaacttacctgaagctgccaaagccccgactctgctgaagggtctgggcaaacatctcatacttccgaatgtcattgtcactgacagaacggcgcgcaaagcgcatggcttcttcaaagtgatctcgacggatctcaggcactggatcatcctcttctacctcctatagttggtaaacacagatcactagggctagttaaagcccagcctggatttcatcccaggcctcccattactgcagtttattggtctccttgcccttccaatccaacctgaggtaagatgctaggccatgcttcctaaaattgagtcactgctctgcttaaaaacttgtcaatgcactctggaaaagggaaaactgtagggacagaaatcacatcagtgatggggcttaaggaggggagatgttgactgaagtggctaaggaaactttttgagatagtagaaattttaagtctcaactgtggtagtagttatagaacttacacacacttgtcataaagcatggaaatggtatatagaaagagtgaattttattgtatttatatcataccttaataaaccttaatactttaaaaggaaatgccaatggctttcagtgcttaccacatttggattacatcctacctagcggtctcacttccagtgacatatatactcttaaatctacccagggtttcccaatgattgcaatcctactactagagcacattatttgggctgcttattccctttattcaaattctactctcttcacagcccagctcaaaacctatctcttccattgagaggccaatttctgtgacttatgtgactacctcctaggattagttcatcagtagttgttaagcttttatgggagagagaagggatgtcacagacccttcaaaagggaaagaaagccatttatttgctcattaagtcccatgtttggaacttaatgaattaattaagggtaacacaagacatagtggaaaacaagtgagatgacagagatcttacctttatggaacttacaaacacatgaatttgccttttcattttgggaggtctgtggaccctatcccttccccaaccatcagggataagtatatgagtctcatctcagctcaaaaccttgctctgtggttcacgcctgtaatcccagcactttgggaggccgaggtgggcacatcacaaggtcaggagatcgagaccatcctggctaacgtggtgaaaccacgtttctactaaaaaaaaaatacaaaaaactagccggacatggtggcatgtgcctgtagtcccagctactcgggaggctgaggcaggagaatcgcttgaacctgggaggcagaagttgcagtgagccaagatcgtgccactgcactccagtctgggcaacagagtgagacttcgtctcaaaaaaaaaacaaaaaacaaaaaacaaaaaaaaccttgctgtgtttgctgcactctcatactttgatttccctcatggagcttggttcagactgagaatggagcctgaccatctcttctcggccttattccaaattgaatggattcacctcagcattctttatctttgatgccctattaaaattcttctcagttagatgatctttccaacagcttctactctcaactccagggcatggtggtggctgctgcctggctctccatgattggcacatctggggaaaggatgcagactcaccatggctgatgggtttgtctgcctctctcgttctcgcctaatctcactctcgatggattcacggatggccagcttgcaagcacgctggcaaatctctgtcaggtcagctccagagaagccattagtcattttagccaggaactccaagtccacatcctaaaagcagcagcagaggtaccttagcatttagcctctcctctcgagatacgcagatctttgggctacccgagcactcccaactacagtttgccccttctttggccaccccattttattcctgattctagattatcttgatatcctcaaaaattctaccttccctttagaccaaccctaaccccagtggaatcttgtccagaaactaaagagcactccgtaccagcctgaggactcatgcaagtctcccacagcccatgatcttgcacctgccttggcaactggggacttgcgcaggttagccttgaggatggcaacacgggacttctcatcaggaagtgggatgtagatgagctgatcaagacggccaggtctgaggatggcaggatcaatgatgtcaggccggttggtagcgccaatgatgaacacatttttttttgtggacatgccatccatttctgtcaggatctggttgatgactcggtcagcagccccaccaccatctccaatgttacctccacgagccttggcaatcgaatccagctcatcaaagaatagcacacagggggcagcttggcgggcctgtaggaggaatggattgattcaagcactaacaaaactagatgtctctaggcaaacgtggtggctcacacctgtattcccagcactttgggaggccaaggtgggaggatcacttgaggccagaaatccgaaaccagcatgggcaacatactgagactttgtctctacaaaaaataaaaaattagccagatgtggtgacgcatgcctatagtcccagctactcaggaggctgaagtaggagaattgcttaagcccaggtttcaaggttacagtgagccatgactgtaccactgccctccaacctgggcaacagagccagaccctgtctcgagagagagagagaaaaaaaaaataacactaggtctctcagacctcagaaagaaaatcaagtgacttactgtgcagttgagcagccagcactaagaatatttcaaccctcttaaagaaaaacagcctctattccttgccctcaggcaaatcaatacatagttcagcctattgcagctcaccttgtcaaagatttctctgacattggcctcagactccccaaaccacatggtgagcagctcaggacccttgatggagatgaagttggcctggcattcattagcaatggctttggccaacaaagttttcccacagccaggaggtccatagaacagaactcccttggaaggtgtcatgccaaacttcaggaatttgtctgggtgctccacaggatactaggaggaaaaggaaagagggttcaaggctacctccacattttgaaagaaacctaactaaacagaagcatcccctccattatttcatggtgtacccaatggtatcagatccaggttctctagaagaagactccttagtgcctcaaacctaagaacagtaggttcctaagtcgtgctctcacaactcttgcagcaaatgtgttgacaccctgagatcacccaggtcaattacaatgtactgagacagtgactcaccctggaccaagttgccctacctggaccagctcctgtagctcacgtttgacatcctctaggcccccgatgtcttcccaggttacctgtggcacctctaccacggtttcccgcagtgctgatgggttactctggctcaaggcccactagaaaaggagggaaaactggggatgagacttaccaagggaggggtcaaagcacgtatgtgtgtacctgaggcacgggtgtggtccttacccggaagtcatccatagtaactgctagagagttcatgacctcggcatcaatggtctcatcctctaggtcaatgagatccatcttcttgcggatggcttgcagagcagcctctgagcacagggctgctaagtcagcacccacatgcccgtgagtctcattggctacctgcagagaaagatctacttactatgctgcctcaaagacccagctgctgcaggaggctcagagacaatagaatccttcccctgactgctatccctgggtcctctcatttccttgaatatatactatcaatacctttatgggctgggttttaagtacttaattctggacttgggacctagaaataaggctgctccaacaattctgatttactctaaatgcagcgtcaactatgaaaaatgccaactcccatttcctggattcaatctcagattacttcctttcccctgtccagaaatcaaaacccatctcctcacatcttaaccttatgtctctagccagttcccagcaactgcctagagacactgtaacgcctggtcagccatcatcatcacttcacctgttccaggtccacatcatctgccagcttcatgttcttggtatggatctgaagaatctctaagcgtcctgtagcatcaggaattccaatatctacctccctgtcaaagcgacctgtgggacagtacacaaacagtacacaaacataaacagggctcatctctagtccagaggtaagagacaggcctagggtgaccaaccatctcagccagcacaggattgtcctaatgccagcactaaaaaagtctcaagctctgggaaacctttcagtctcaggaaaaccagggtggttggtcactctagacaggacgtagggtaaaggaaaaagacccctggacccaatcactgtgaagggcttcaagaggattaggtgacttagatgaaggagagaagtaggacctaagcaaggacggggtcaaaagtatctggagtccttaccaaatcgccgtagagctgggtcaatgctgttgggtctgttggttgctgccataacaatcacatgtgccctctgctttaggccatccatgagggtcaacaactgtgatacaatgcgccgctccacctcgccatgagtctgccagaacaggatgtctggtcagaagtgaagtcagggcctttcaacccccctctatcccctcaggtaagctcctactttctctcttttgggagcgatggcatctagctcatcaatgaagatgatggcaggagcattcttctcagcctcctcaaaggctttacgaaggttgctctcagactcaccagccaatttgctcatgatctcaggacctgaaaggatacagaatggagacaataacaaaatgatagtctttcccaattcctcccaaaaatcagttatcttgcttgtttggcccagagacaggtcctgggtgagaaggtggtaacctctgcctacttctcacatcctctaccagccattatcccaggacagccaccaggcaaggctggagagaagcccagggactcactatactcttctcacagttgaactgtaaaggtgacagcaaatgctctaggacctctggctagagcaggagagatggcacaccagatggcacaccactaaacagcattctccaagagccagtgatcaaagttcatttgccccaaaccctctcaaatcactaaccattcaccctttgatttctcattctagcttgctcccgctctgcagtctgtccacaatctttctcaaagggggcaggacagggagcaccaatgtaaaatatcttccctttattgctcttctgtctgtaacataccccagcataagaaatatgctataaacatgaaggagggcatgggtgcaaaaaggatgtgttcataagtgctccagctcataagcccagttcaaaattgggtctagctagacataagatgaaccaaatatcttaccattgatcaagaagaagaaggctccagtctcatttgctacagctcgagcaatcagggtctttcctgttccaggaggtccgtaaagcaggattcctctaggaggctgtggaccaatgcagagtgtgattaggttcccaccttctcccaaaccctaaaatggcttgactagcgctccagagagggtgagaatcaggcttcaaccctgacaatattaagaataagccctccgcagtaaatgctaagaagacaattactttaggccacactcatttctattactagcagggaaaatactgctagaaagtgggcaacatttatgattgcaacttgcataggagactaagggcagagaaactgtagtccaaatgcgtttgaagatacatgactagggaaaggcaagaggccattacactaagggctcaattttagacagaccaagggccaaagactagctaagccatttaagagagcagggtctattttcttcattgccagaggatcactcactccagtaatcatgccctccagaatttatcacactggaatgctgttccttacaatcatcatttttcttcttcaacactaccctttctatggcctcatccacaagcagaacatgtaaactgtccacatagaaaatgaaattatttgtgtgccacccactaggaaaatgagtaacttcatcttcagtgtgttccatggaaacactttcccactaggaaaagattgagaagctacactctagaccagtagttctcaaatgttttagactcagaaccctttaacactctgaaaatttccttaacttccttacgtctactgggtgacattgctctagacaggctggcaaactatggtgagatttgtttttacagggtccattgatacaagaatggcttttatattctaagagttgtaaagaaaaacccatatatatatgtgtgtgtgttttgtgcgcacacgcacacaacagacaatttgattagcctactctggttttagaccatcagctctaatgaatttagagccttaggtaaactaaaggatacgttattgcccctctaatccaaggcaataatgaaagccatgcatgaaaacagtcccaggattagacattgggacaggattagacattggcaccactttagacttgattccagagcccaggatgctcaccttcacaccaattgccttaaagagggcaggatgtctcaggggcagttccaccatctcctttatctgagctagctgcttcctgcagccaccaatgtcatcataccctacttcattcaaggactcttcctcatcctgaatatggaggagataaagaaaggagaaggcaagaatattatatcagcaaaagctgagtttctctaaatcattccactacctagtgtgcaaaaacctaccgtataagaagattctcaacccggcatggtggctcacatctgtaatcccagcactttgggaggcagaggtgggaggaatgcttgagtccaggagttcctgggcaatacagcaagactccatctcattaaaaattaaattaaatttaaaaaagattctcctctaaagggatccggcctcaaagaacaactacaaaaatcccaaggcaaagatttctagcacagtccttgcctctcacattactcgtagtcttactgagaaggggtctctaaaatctgaagctggaaaccctgggaatgggcagaggcctgaagccaccatcagctttacttcaaaaatgatttcaatcacttatatattttgggttcagtctagttttttgaaattcctggcattaggtaaatccgagaaacaattaggcccagaaatgaatagctggcaggtttctcatccctgaaagatggttagttctccaaagaacacccagtctttttcttttttgagacagagtctcactctgtcacccaggctggagtgcagtggcacaatctcagctcactgcaacctccgactcctgggttcaaccgattctcctgcctcagcctcctgagtagctgggattacagatgtgtaccaccatgcctggctaatttttgtatttttagtagagatgggatttcaccatgttgcccaggctggtcttgaacacctgacctcaagtgatctgcccatctcagtctcccaaagtactgggattacaggtgtcagccaccgcagccggccgagcacccagtcctgacagttaccacatgatgccacactgagtaatcataaaatcggatactggaatcagggagaaaactcacctctcgtttgataggctccccttcgcagtggatcactgtgtctggagcaacaatgcaataagggctaggatctgtttccaccactttgaactccacagcacgcatcccaccacggacaagaaaaatgtctcctgcgagagcaaacagtacaagcacagttagaggtgtcaactacaagacaaagtgagaactcatcagaccctggggtcaaaatgccaagctcattagatagtgcccttcattagatattgccctacctctccccaactccaccccacctgtcttaataagcagcaggcaagatgagaaaggtaaactgtgaagagtccctctgacaagaggtcagtgaacaaaacctgacatgtcagaagcccatcaagttctgacttctgccatataggtagcccaagttttcactacaaccaccaatggtagaactgtgcactctggaccctgacccagccaaaatggaccactttctccttcagagatccataaagatagcttactctcctggaacagagaaggggagagatggagcaaaggaaggatggaggaaaaaaagagggtaagacatatgaatatgtgtgcagggtttgcatgtgtgtgtatacaaatatatgaaaatgagtctagcggccgggcacagtggctcacctgaggtcaagagttcgagacgagcctgaccaacatggtgaaaccccgtctctactaaaaacacaaaaattagccgggcgtggtggcagacgcctgtaatcccagctacttgggaggctgaggcaggagaattgcttgaacccaggaggcggaggttgcagtgagccgagattgcaccactgcgctccagcctgggggacagcgcgacactctgtctcaaaaaaaaaagaaaagaaaatgagactaggcttgatggctcatgcctgtaatcccagcactttgggaggccatggcagatggatcacttgagcccagcagtttgagaccagcctgggcatcatagtgagaccctgtctcttttttttttttttgagacagagtcttgctctgtcacccaggctgcagtactgtggcccaatcttggctcactgcaacctccacctcttgggttcaagcaattctcatgcctcagcctcccaggtagctgggattacaggtgcccacgatggggtttcgccatgttggccaggctggtctcaaactcctggcctcaagtgatccacccgcctcagcctcccaaattgctgggattataggtgtgagccacggtgcccagctgaccccatctcttaaaaaatgaataaataaatacaggggaaaagcataaaagatttaaaaaaaaaaaaaagaaaaagaaaatgagataaagatgttccaaggtttattccctacagtcaataatccttaagctcagaattagctctcacctttccggatgggtcgatacgcttccaggaagtacggcttaaggtatacctcgaagagattaccagtaatgccttccactgtgtcatcaatgggcagcacatggatacgtttgccgtacttcacatcagggcatggctggatgctgaggatgacaagcagactccatattaccaaccacacttcgggcccaagcactgggtgtccaaaagggcctggcacagatagctgatagtaagtgaaaaagaaaaggcaggatggctttaggcgaagagaggaaggagaacagggtggaagtgagggcgaaggaacagccccactcactcctaatcagtgagccaaaatcaagagccacacatttagaaaccccacaaagacatgcagggtcttcagggagatatccaaggatgatccccttctagctaatactggtgacccaatattacaagggaaggtcttaagctaacaattgtcagggtcagtgaaacagaagtgaaaaaaacaaaattatctcagccaggtggtcagaacaccttgaggaagtgactaagcactcccaagaagaaagctacatgaaacttagactccattcaaaagaatcaaaagcctgagatgatcctggccaggtgatggttggttgggtaggagtggctagagatgactccaagatggggtaacctcttgcctaaaattatgcaagaacaagcaaaatcactcacattgagagctatcccaggtctggctccaactattcctctctcccgggttaacttaggggcttaaaagacctgctagcagctcaccttccatgcccatacccccacctcattccaaccccaacacaagccatcaattagacatactagtgagagtagtgaggagattatttggcatatacatacacaccctcgagtggtatcctaagccaggatataagtatgataaattacacctctagtaggaaaaaataaagccatcaagaaagttacaggaacgccaatttgtctcaagggacctgcagaaatggattttgaagtcccagggaggcagaaccaaaacctaaagacaaccctgaagcataagtcttcccatgaccaggaggcttcctgcatcgacaggtgccaagaacttggtcctgcctgtaatacatgggtcctgcctgtaatgcaggctatctctggcctcccatccctgtgaagccaaaaaccccacacacacctgatgacatcccctaggcgtacacgaaggttattccgaacaactctattcatccgaatcttctcatcagaacaagtatcatcagaaaggacgatgcaaacagcttctcgtctcttctttcctttcagcaacactgtgtcacctcggaacaactgcaattcatccatcttgggctgaggaaagaaagttaaggcctttgggtcattgggctgacggggagtaagcagcagccctggagattgggattcccagtaaaccccactctatctgcagtcactgcaagaaaaatgagaaaagaaacctgggaaaatccctcaagtaagtgcagtaaggaaagactagtctgtggccacagcttacctgggacaaggacaccacactgttgtcctcattgatggcttcatcaacaattaaccgattgggacggttcttctgtttgagaatggctgttgataggtcatcaccttttgaactagaaggaggaaatggagtcagtagatactcctgccccaagcgcctcgccagtctctaaaactcatacttaggaaagaaacagtgaatagatgaagctgtccctagaccagaaagctcagatgaaggaaaggcagccaaggtcacgaggagcagtatctaccatacatattacaatacccattccagcagctcctggtattttgagcgtcagtgtcccagctataaggccccaagtgagtgatcctgccccagggtcagaaaataatggcctaagaagaagacataatagaaatggaggctgaatagttgttagagaaataaaaatagtcttagacttacagaagagtggttaagagcaggaactctatagtcagacccattgggtctgaattccaattatgccactgcttaattgtgatcttgggcaagttacctaacctctgaactttgatgtcctcctctataaaagaaggaatataatacttatctcagaggcttattgtcttaagggagataatgaatgtaaaatgcttaacataatacctggcacatggtattaatggtcaccatgattaacagtatagagtaaagcataagctaactttccagggaattaagtaagccagacaacctcccttgaggctcagggaggccttaagttctaccaagcaagcctggggacaacgaagcagaatcattggtgctaccctccttataggctaaacctactgatgccagggcattccatagtaccaaaggaatgccaagcataaagaccatcatatttggaaaaaacactaacagacatcaaaccgccagaaagaggctcaaggtcaaaaggaacttcacagtaatatctgcaaaagtacacaattccataaagttggctcaaaaaatcaaaaccaagaaatgctgagacatggggcaaatccaaatccctctcacccaaatcaaagtcgactgggtctacactcagtgttatttcctagaagctaggatcattcaccagacagtgacaccaacttattacctagcccgtttccagctgtcacttactagactcagcaagctccctctccctttttttttttttttttttttttttgagatggagtttcgcttttgttgtccaggctggaatgcaatgctgcgatctcagctaactgcaacctccacctcccgggttcaagtgattctcctgcctcagcctcccgagtagctgggattacaggcatgcgccaccacaactggctaattttgcatttttactagagatggggtttcaccatggtggtcaggctggtctcgaactcctgacctcaggtgatctgcccacctcggcctcccaaagtactgggattacaggcgtgagccacagcacccagcgctctctcttttttaagagcggcctcgtgttagtaaggctcaggaaaacataagcattaaccaaagtaggaaggccagacaatgaaggaagcaaagaaaataaatttttaaaacgaatttcttcattcaacaaattcatgagtctctattatgtaccaggcattgttctaagggctggggatactgaagtcaacaaaacaagacaaaatagtattcccattggaaatatcctcacaatttgcaagagacaaagaaaaatgctgtgctcagctaggaagccatggggttcttacatctttgggtcctgatacacccaagagaaaaacaaaccccattcatctaacaaaatggtaggccttctgctaaccctcacacataggctgcatttttaaccactgcctctaaactagtttctaacgacagtttcctctgctcaaatttgcttcccccattccacaagtctgccactccaggcacaatgctgctgagtaggcagactcttccaatgcttatcaacacactagaggccaagcatgctcaatgtgacagttgagagcaatgtaaacccacgagctctcccactcctgtcccatcaaaatactcttccagggactgcccatcttcttgcttgacttatagaactgggactggagaaaaataaaacgccagatgcctctagtcaccatagttttttattttttgaaacggagtctccctctgttgcccaggctggagtgcagtggcgcgatctccctcactgcaatctctgcctccctgggttcaagtgattctcctgtctcagcctccagagtggctgggactacaggtgtgcaccatcaccatgcctggctactttttgcattttaatagagatggggtttctccatgttgcccgggctggtctcaaactcctgacctcaagtgatctgcctgcctcggcctcccaaaatgctgggattacaggcctgagccactgtgcccggtcaatagtttgtattttaatctcaaagctgtatcctaggaaaacctccattctgcctaccatcccggactctggctctggagatgagtggtatgcccttttcttaaggtaaagcctctaattccccatctacctactgagatcagatgtggtaatctctaaaagactgaatttggcctgaccatgggccaacagcagttctggacactctttggggcaatcctccattgtcttctgtataagtcaatccctttccagaactgcacaggggactccacgggacttggaagggtttcagctaagagtcatcaaggtgaccaagaggttagaaacagctgatgatgccaggttccaagaattttagatttttacttttgaaaataagaggctgactgcatataaaccaaaagaatactttcagaataagtgactcttttaaataagcaactgagtaatactttatccgaattcagaaacttgagaaaaaggaacacacctcaaaaaactaatctcttcaaggaaggaaggtaatttgcatagagtttccttgggctggctgtgttttttttttttttttttttttgcctctaaaagctctctattctaaattgaatgggctgaggtagccaagttttatctaacgctttcctaaggatggaggtggggtcagaaagccccagagcccgggtaatttctcaatatagctggttggggaaaggagtgcgcgcacgtttgtgtttttgaagagttagtgcaactctaaactgcacaccacgaaacctggaaatctggaaaggcgcacaaaacacgaactgagattccaactttagcaagaacctaaaatgttaaagaaaaattcctttctccccacccacgagtcataacattaaggaaaactggctcaaactttctagtatgaacaacaggcctaaagtaagaagaccagaagcgaaaggtagggctcgccctctccctaacagtccttcacgactcaggtcacacacagaggatgcccacctccggccccgccgacccggctccaaaaaggcggctgtgagcttccctgagctcggcgggccttccccgaccccgggctccgcctcggtggcagagctcctgaggccttcacatggcgcaaagtccacgcccaccgggcccggctggggcctcgggctcgcggggcctgctctctccggggaccaaaggctttcggcgggtggtaggccggacggcagactggcgccccaaagccccggggcgccgccccggcggagtgggccggaagacctggccaggcccagacgtccgttctaagggagccaatcgggcgggccggggcctgcatgacacagcacgatccggcccaggctccgacccggacccaacgcaagccccgcctagggggcgcgcgggtgcgcagctggccccagccgggcctgccgggtccacggcccctcactcgccccctagcttcccttccctctttcctggtctccacctctctgacgcgcccacggccaggccccgccgggcctaccctgcgcggctggtcccggtgcgcgccgccgcagcaagcgaacggcgcgcgcacactcactcggctccagaagccatggcgcgcgcctctcccggccggcggctgtggcggcccgcgggtaacggctacgagcggtggcaagcgaccgactgggccggggctcggctcttccaggcggtgggcgagcagcggcgacaaacccgcaagcggcttccctctcgcttcctcccaccggcagcgaggcgtcgggcgaacaacgctggctcctgatccgcgaggtggcagtggcagtggcagcggcagcggcagcgacgactcaaacgacggtcgcagacgcttcgctgagactgagccgagaagagccgaatcatcggaagggaagctgctcccacctcagccaatcagcgcctgccctgcggactctcgcccgcctctccgcgcctctccccagcaacccgcagatcacagccaatcaggaaattcgcttgcggcctggctcccgcctcagtgatgcgacacgcctagtaacgccacgtcaattggccgcaacgctacgcttcctcgacggattggaattctcagccaatcaacgaaaggaatagggcgagatcgattagtgaaaggagaccctttaatcccttagaggcggactctcccacttggctccagttcattggctccggagtttatcctcctggaagaacgtggcacaatagactgaacccttgtattagtctagtcctattgtggtaacccatacacccatcttctcccaaaacctggagatcttctaagacgccatcaccaccctgacacttcttgctccttctcaacgctgcctccaaccacccctactctgaactttctgactagcaccccactcctaccccattgtcactgcaccctctggtaaccccaatcccacagcctttgcagtttctcagcgcttgtgcctttcttcctcccgtcattaatattaataccttataataaggcactcaaatccagagaagtcaaagggcaaccacagaacacacagccaattcagtagaacccaaattagcaagaaaactgcatatgctgggacttgaaaatccttgggccccaaataacaggggtccctgttagtagtcaacaggcagctgttggtgatatgctgactcaattcacctttcaccctgtacccacacagacacatttgactaagacgagtcgaatttctagaatttggaattaggaagggagtgaagagttactctgagagaaacctgcctgtctctaagtaacaggtacctgcccttgtcctgagaggcctatctagaccacccttcagacccaactccactcattgtcactgtcctgggctttggggctctgcattcaggcaatgtgaaggactaaagccactgcctccaaagtgaggattcctgtagccctttcctcatacccagacttcaagttcataaggtagacgatgtcaggaaagggcatcatagacaactagcactcaactagacggtcacaagccttcccacgcaagtatatgtagtaggcagacgagataaatatgaaattttactcgacaacagaaaaggagaaacaggaaaaaaggtgcctcgagcaaagtcaatgacttggtggtggcagagattgtttcctccaaaacgagaatggtagtaactagggcaaatttcacaggcctaccaccaatctcaccagtccaggaattatataggaatggtcacattcctaatgatggtgaagcagaaagccctccccacagagagacagcccactggggacccagctcaagctcttcaaaacgtggcagctacaggtcacaagactttggcagagatgtccgaaattcttcaaggaaggcgtcacgatcagagggacggatccagctcaaatagctttctaggtacagggggagagacctggagagaaagaaggatgatgcctaagggtgaaagattggcagaaagctgggcagccatacccccgctttcagtgttcaccacccacaataggtccaaggactctaggacaccaactgcccctcagccccaagccagcaggcctgagcctcaccacagagcatcttcatgtgaccccttagtttgggcctccagcctccaccagagtgcagtggcctcatccctccgatctagcctcttcagagtctgaagcaggtgaaagtaagtgtctcgattacctgtagccccagcccagagtacagagtcttagaacttgacatagtcttaggcattgttttataaaaagggaaactgaggcctagagagaggaagtatcttgcctacactcacatatggaagcgggggcagatcattcacaaccattcccatcccagtgtccatcatctgccccctactcctgtgcaacccacaacagcagagtcatggtctttgtgtctgaggatatcggggaaaccagggaactcttgggagccctgcatacacactgtgtatatttgaacacctggatatatccctaggtatatatagcacaaccccaatcacccctcctgtctgagaacaccactcttacacttacgcccaagtatttcccatgggcctctctgtccttgcacatctatgcatagccgacgtcatgcaagtacacatacctgggcacatctgcacactgaggaggaagtcctgtaaggctttggtatcctggccgctggctacccattccagtccacgactaattagggcggctgcccgaagctgctgcagtgccgcatctgacttacatccctgctcacagttgaaagctgcccctggggaccactcccaaagtcaagaagtgtcttcccagcctcacagtcaccaaaaccccaaatcctcctctatttcttcttgtgtccacagtccctttctcttaagtctcctggtgggctgggacacattaaagggaacccacttccaccactaccacttccaggaggtaagaggaaaactgaaagtttagatcaccttgttctttttcctcaggtgtggcccggaagagcagctcgaggcacctgaagtaggacacagaacaggggtgaagaggaatcaatttcagaaactctagggtaagtaggtgaacatggagctcaccaactcaggtcccaatcagaaaatcatccctccacaccccctctaggaccccgggctcacctgctaaattcactaattgccactttttgggcacccagttgaacccaggcctggccctgaagcaggtgggtggcagagacccagagtgggcagtatggcagttccttggttccttttctggcatcttcccacagccgggacatcttgggtagcagagatgatgtgcggctgagcaactcctcacatagagtcaaggcatcttgggctctgcctgcctggatcagtgctaccgctgcctccaaaaacacctcaggcatacagggccctggaggggaggggggtggggagaactggagtgggaagaagaagcagtgtcttgaaaggcatgagccaccatccccaacctcttcaccaggctctggtaccatgcagagtcctgggcccccagactggacagacagaatagaggaaaaaacaaaaaattgcagtcttgctgtatttcaaaggggacaccaacccgtctaccccattgcagagaagcttgaagacacacccacccttggctccgagctatccagcaacagggccagcaggtccaagtaatgctctgcagcgtctcctgccctgaggagtaaaagcccataagcctcaccctaggccctagcagggaacctgcaagggtcctgagaatgttctctcttagctaacagatggatgttcatgggccctgaggaggagaaagggagggaaggtcttagggctccaattttggctcagtatggatctaccccagttacagaatggactggggaagagacttcagagtgtcaaagatagagaaggttaatgtcttagagaagagtcctcagttcaggtctagaagcaaggtaagaggctgaggagtggcgacctatgtcctgccactgcctcattcatcccccaagtcacaagaacaaaagcagagtcacaccccaggggaggcatcagaagtgggaagagaagctcaggtgagcaaggggaacctcacctccccgtctgtaggcacctgcttgctagtatgtgcttggtctggctctgagtgccacaatgaaggggtgaggctaggtcaggtggtggcagtagtaattctacctcaatgagaaactgcggggctttggaactgcatgggacattcaaggcctaaaagagaaagaaaaaaattgtatctataatctttgggagccatacttccttatacttggatcttgactagtcaagtcaccccatcacaagcacctcaggaatcctccaccccacatcttcacctggcagttccctacctcaactagcagctccagactctccagctctgctgttgtgtcccccagttgctgatagagcctagaggcctccagaagtggaggaccccaggctgatccctctttcagggctgcaaccaagtacaacagtgctctctgtggatttccctaaagggataggaggacacgggcctcagctacccttacaaagcaaaaagctatacataatgcttgtggtttccccaatccaccctaggactgtctttaccatcttacggtgacaggaccccagtgctgtgtacacctggaccaacacaggccgtggacacaggcctgaggccgcttcatgaaggctgcttagtgccttgtctgggttccctgtgatcagctcctggagacctgaggacagtcagggtgtgagcttggagagggctatagagcaggggtcatgatggggaacaagggtctaagaagcccatggaactgaatgggacaagagagagggcatgagtctggaggaccacttaaaggtagaagagatgagtcaggttgctagctgaccttggcggtaggcaaatgctgtcaggaggacatccttcaatccctgggcatcctgcagggtcaatggagcatctaattcctcagctgggggactccaagttttcagaagtaacagcagatccttagaggctccactctggggaaagaaggacaaccagaagctccaagcctacaacctccccgtcttctcctatctccatctatcctggctagaccttgagctcaagggtcctcttgatccttgaggacacaggcctcagctacccttacaaagcaagaagctatgcataatgcctgtagtttcccccaattctaagagatagatagctatgaggcaagaattaaaaaaaaggaagaaaaacctggggcagtgatgatctattccagcgtgcctcctcactcagggcaaggaccatatttgagttactaataaggagactaaggctgagagctgacttgagcaagatcacaagagccctatccctatccaaaaaaaaattttttttttttttgagacagggtctccctctgtcacccaggctgcagggctggagtgcagtggcgtgatcatagctcacaactcactgttgcctccacctcttgggttcaagtgatcctcctacctcagcctcccaaagtgctgagattacaggtatgagccaccatgcctgtccaatttttaaaaaacactcctaagagaatccccacaatgagagaccaaccagggcaaggtcacccaagagtcccagagagaatccaggttttccgaccaccaacccagccgcctgtccagtacatgatgatgctactgcagctggagagaaaggaggaggaaggaaggaggagaccctcagcttcaggtcactttccctattacctggctgccattcagggtctctagtaacaaggccaggtccccaagacggtcagcactcaaccagagggcagcctgcaggccaaccaggcggtgcagggcagacagcagctccggcagaaggcaggaagcacgaaggacagagtcccacagctccctgagcccctgttccaacctgggcccctgctgctcctgtgtctccagcactgtagagtatacacacacacatagacacacacacagctgaagtagcacctcatcctccatctccccacacactctggctttcctctcctgcaggaccccaaaggtcacaataataatacctcaacctggtctgaagagcacagagaagggcacctctctccatggaggtgacagatgttgtttatcctcccatctccctgcaataacttaaacccagactgaagatggcaggggaatcagggacaatctctggccctcacctctctctaggctccgctggatatcctgggcctgatcctctgtgaaaccctgggccaagcttgccctcaggataatgaagttgcaggtgacagtcagctccaagggaagaacaggaacagctgcagggagccctggagcaacaatgttggtcttacagactgctcccccatggaagatcctccaaataaaatcccaactcagagatcaccccactccaaccaaaacagctacaataaagaacccaccctccagccaattagctaaggatttaaaaaaagaacccaacctttggacagagagtctggaaagggcaaaaaagttatccagatcagaccatcttggaaaccatttttcaaatgccactctgtgagtgtgtaaggaagagagggatttgcctgtacaaagatgattccactccagtctcctctgtgccttaaacaggactccctgccccgagtaattatatcgatcccaaaaacgcaggagcggatgtttctctggctatggaagaggggaactgaccatcctggggaggacccgcctaccttgcagactatggaggagccctctgagcccttccagtgcatcctgagccaactgctgtcgcctcagagtcagaccggagttctgagccacctgccacatgagggaggggttgtcactgaggatcaatccttttttctccccttgcagcagtggcaagggatgcattctccagtcatttctggctctttggtcaagctcagtccctccccatctgttggggtaaatccactgcaaacccgctttcagggatcttgaggctgcaaaccgagggtgccagcaaccgtgttaccttggcctgtcgaacgagccggtcattcttttccctccacaggtccaggcagctggagcccacagaggtggtctggcgggacatggtggccgaggctgggcccggagaccagaagcggacttaggaagggtgaagctggcctgcccaagctcccaaccccagcggggaggggcctgggcacttctgcaccccgccgagctcccctgcttctctcggggtcccaatccacccgcccaggctttccaggacagatgggacgctctctccccgcggcccgccgggctctcaacctcgcctctggttggccgggtctgcgaagctctgggctgcggttggtcctcttgaagagttagttcccgcgggaaactcggggaggaaacgagtcagcaaccccaaacaggcttaggcgggctagaagccggggtcgtgtctgactggggcagtcgcacggccggcggtgcggcccgctcggctctcgcggaggccacagcctcgagaaagggtgggcgggagcgagtttcggccccacagtccgtggctcggcccttcctcgctgccacacccccaggtcctcctgggttcccgcttccaccgagggccgactgcgaggtgcatgctgggagtcgtagtaccgcaccggggcggaacagctccgccccggcggatggtgtttccagaaagcggtaactggagacgagggcgctccgtaatcgtccatcctttctctgctcactgtcgagcaccaacacgctcaccaaggtcggctttctaccgcgtgtagtctgctggcagtgccgctctgtacttgcactgctcaaaagtacctgcccaatcatttcaaattaaatggagctaggagaattgaatatccatatgcaaaaaaaaaaaaaaaaaaaagacaggaaagaaaagaacgcgaccatacatacgtacataaaatcaactcaatggatcacaaactaaatataagagccaaaaatataaaacttctaaaagaaaacgtaaagcagcctaactaacatggtgaaaccttctctacaaaaatacaaaaattagcagggcgtggtgtcgtgcgcctgtaatcccagctaccccggaggctgaggcggaagaatcgcttgaacccgggtggcggaggttgcagtgagccgacatcgtgccattgcactccagcctgggtgacagagtgagactccgtctcaaaaaaaaaaaaaaaagaaaacgtaagagaacagctttatgaccttgggtttggcaacaagttgttagacacagcactaaaagcttgtacaatttaaaaaaaagttaactttattaaaattaaaaactcttgtactacaaagacatcattaagaagtcatacgctggggccgggcgccgtggctcacgcctgcgatcccagcactttgggagaccgaggcgggcggatcacgaggtcaggagatcgagaccatcatggctaacacggtgaaaccccgtctctactaaaaatacaaaaaattagccgggcgatgtggcgggcgcctgtagtcccagctactcgggaggctgaggcaggagaaaggcgtgaaccccgcgggccagagcctgcagtgagccgagatcgccccactgcactccagcctgcgcaacagcgagactccatctcaaaaaaaaaaaaaaagaaaagaaaagaaaagaagaaaaatcataggctggatgtggctcatgctgtaatcccagcactttgggaggctgaggctggaggattccctgaagccaggagttcaagaccagcctaggcaacaaagatggtgtcttttgtagagacattatctctacaaaaaatttaaaacattaaccctggcacaataacacacctgtagacccagctacttgggaggctgaggtgggaggagcccttgagcctaggagttccaggttgcagtgagccatgatcacaccactgccctccagcctgagtaacagagtgagaccctgcctcaaaaaaagaaaggtcacagtcacagagtgggagaaactacttgctaattatatacctcataagggactggtatccctaacacataaaaactcccaaaactcaagaaaaagatttttaaaaacaatcttagctgggtgtggtggttcatgcctgttatcccagcactttgggaggctgaggtgggaggatcatttgagcctcagaagtttaagacctgcctgggcaacatagcaaaaccccacctctacaaaaaaaatacaaaaattagctgggcatggtggcacacacctgtagtcccatctactcgggaaacttaggtgggaggatcacctgagctcagggatgtcgaagctgcagtgagccatgattgagccactgcactccagcgtgggcaacaaagtgagaccctgtctcaaaacaaaacaaaaaacaattttaagatggaccaaaaaaaaaaaaaaagacattttaccaaaaaagatctactaatggctaagaaacacataaaaagatgctcggcattattagctattagagaaacacagttaaaaacatggccagggccgggccatgttatgcctgtaatcccagcactttgggaggctgaggtggatggatcacttgaggtcaggagttcaagaccagcatggccaacttggtgaaacctcgtctctactaaaaatacaaaaattaggcaggcatggtggtgcatgcctgtaatcccagctacctgggaagctgaggtgggagaatggcttgaacccggaaggtggaggttgcagtgagccgagatcctgccactgaactctagcctaggtgacacagcgagacttcgtctcaaaaaataaaaaaacgcttcacacagccgggcgtggtggctcacacctttaatcccagcactttgggaggctgaggcaggtggatcacttgaggccaggagtttgagaccagccaagccaacagggcaaaaccctgtctctactgcaaatacaaaaattagctgggcatggtggcagacacctgtaatcccagctactcaggaggctgaggcatgacaatcacttgaacctgggaaacggaggttgcagtgagctgagaccatgccactgcactccagcctgggtgacagagtgagactctgtctcaaaaataaataaataaaaataaaaacactatacacatacatacataaaatgactacaataaaaacagattataccaagtgttggtgaggatgtgtatgaggaaccctcatacactgctggtgggaatataaaatagtacactcacttcagaaaagtttggcagtttcttaaaaagttaatcataggccgggcgcagtggcttattcctgtaatcccagcactttgggaggccaaggcaggtgaatcacgatgtcagtagatcgagaccatcctggctaacacagtgaaaccccgtctctactaaaaatacaaaaaattagccaggcgtggtggcgggcacctgtagtcccagctactcaagaggctgaggcaggagaatggcgtgaacccaggaagtggagcttgcagtgagccaagaccccgccactgcactccagcctgggtgacagagcaagactccatctcaaaaaaaaaaaaagaaaaaaaagtcaatcacaaatttaccataagactcagcaattccactccaaagaatactcccaagagaaatgaaaacatacgtccacactgagatttgttgcaaatactcatagtagctaaaaatgttcataatggctaaaaactgaaaacaatcaaaatgtccatcagttggtcaaagccaatgatttagcaatgaaaaggggcaaaagagtgcaccaacaaactttttttttttgagacggagtctcgctctgttgcccgggctggagtgcagtggcgcaatctcggctcactgcactccagcctgggcgacagaacaagactgtctcaaaaaaaaaaaaaaaaaaaaaaaagattgaaaacaggccaggctcatgcctgtaatcccagcactttgggggactgaggtgggcggatcaccagagggcaggagaccagcctggctaacatagtgaaaccccatctccactaaaaatacaaaaaattagccggacgtggtggcacatgcctatagtcccagctacttgggaggctgaggcaggagaaccacttgaacccaggaggcagaggctgcagtgagcagagatcacgccactgcactccggcctgggcaacagagtgaaactccatctctaaataaataaataaataaataaataaataaaagaccgaaaacagatcattggcctggggtaggattagggagtcaatgtagggaattttggggggatgatagaaatgttctaaaattaagttgtggcattttgcaataatttatttcatatgacaccaaaagcataagcaatgaaagaaaaaaacaggatgaactggactttctcaaaattaagaatttttgtgtaggccaggcgcggtggctcatgcctgtaatcccagcactttgggaggccaaggcgggcggatcataaggtcaagagattgagaccatcctgtccaacatggtgaaaccccgtctctactaaaaatacaaaaattagctgggcgtggtgatgcacgcctgtagtcccagctactcaggaggctgaggcaggagaatcacttgaacccaggaggcggaggttgcagtgagcccagatagtgccactgtactccagcctggcgacagagcaagactccgtctcaaaaaaaaaaaaaaaaaaaaaagaatgtttgtgcattaaaggatattatcaagaaaatgaaaagacaacccacagagtggagaaaatatttgtaagtcatatatcatttgtaaatcatatatcatatcatatcatatatctgttcagggacctgtatctagcatgtaaaaagaatgctagccaggcacagtggcttacacctgtaatcccagcactttgggaggctgaagcaggaggattgcctgagcccaggagttcaagaccagcctaggcaacatagtggggccctgtctctacaataaaataaaaaattagtcggccatggtggtgcacacctgtagtcccagttactcaggaagctgagacaggaggactgcttgaacccaggaagctgtggcttcagtgagccatgatcacgccactgcattatagcctgggtgacagagcaagaccctggtccaaaaataataataataacaataatccaattaaaaatagtcgaagaatctgaagggacatttctccagtaagcacaagaaaagatgctcagctcagcatcattaatcattaaggaaatgcacaccaaaaccacaatgagatattacttcacacccactaggatggttagaatcaaagacagatgacaacaagtgttgacatggatgtggagaaatcgttacccatatatacttctggtaagactgtaaaacgatacagcaactttggaaaacaaactggcagttccttaaaagattaaacagagttaccttatgacccagcagttgctcagtgtacagctaggtatacactcaagagaaattaaaacatatgtccaaacaaaaacttatacacaaatgtttatagcagcattacataataaccaaaatgtgtaaatccaaatggctatcaatggatgaatggataaacaaaatgtggtatatccatgcaatagagtattatttggccataaagaggaatgaagtaccaatacatgctacaacatagatgaactctgaaaacattaggctgagtaaaggaagataagacagaaaaaggcactactgtatgagcccatttatatgaaatgtccagaacaggcaaatctatagagacagaaaacaaattagtggtaccaggagttaagggggagaagagaaggaatgactgcttaagggtacagggtttctttttggggtaatgaaaacattctggaattgataatgatgataattgtacaacgttgtgaatgtactaacggccactaaattatacactttaaaatggtgaattttatatgaattttacttcaattttaaaaaagaaaaagaatgaagtactgctgtgtgctgctatatagatgaaaccggaaaacattatactaactggaagatgccagtcacaaaagaccacatattattatgatcccatttctgtgaaatatccaaaatgggcaaatatatagagaaacagcagattagtgctagccaggggttggggaggattggagggtgatatctaaacagtagattttcttttggggttggtgaaaatgttctaaaattgattctggtgatggttgtacaattctgtaaatacacaaaaaccattaaatcttacaccttacgtgggtaaattttatggtaaattgcatttcaataaagcttttttaaaaaagaatcagggctgggtgcaatggctcacacctgcaatcccaacacttgaggaggtcgaggcaggaggatggcttgaggccaggagttcaagaccagcctaggcaagacagcaagacccccacctctacaaaaaattaaaggaaaaaaaaaaagaatcattgagttagtgtggaatggactctgatttcaaggaaaagggagggataagataatttttctttttaaaagagagaggatctatgttgcccaggctggagtgcagtggctattcacaggtgcattcattgtgcactacagcctctaactcctgggctcaagtgatccacctcagcctctacatagctgggaccatgcctggctaatttttttatttttgtagagacggagtcttgctatcctcaagtgatcctcccacctctgcctcccaagtagctgggactatagggacatgccacagtgcctggctagaaataatttttaatagcgtaaatcaatgtactaatgtctttatctaatagaatcttatagatacaccaggagaaagaatagacagtggttggcagatcagcaaattagccttaggctccaggcaaggaggctactgcaaaaagtgcagggtacctggctgagaagtggaggaactagggcctaaaatccttccatgggtgctagggatggaggaaaggtttttgttttggtttttttcccctttctcaaaaagacaccatttgctcaccgaactatgcttgggagttgtgtccaccagacttggggagaagcgtttttctaattcatcttacaggccagctggggccaacttcacccccttgcattattaaacctctttctaccatggttaacaacctatcccttttttttttttttttttttttgagagagagtctggctctgtctcccaggctggagtgcagtagcgtgatcttggctcactgtaacctctgcctcccaggttcaagcgattctcctgcctcagcctcctgagtagccggaattacaggtgcacaccaccacacctggctaatttttgtatttttagtagagatggggttttgccatgttggccaggctggtctcaaactcctgacctcaggtgatccacccgccttggctccccaaagtgctgagattacaggcatgaggcaccacacccagctgaaccatacttttcatcatcttactatttggcatctgtaacactagggaccactggccattaataatctgaacttagccaggtgctgtggctcacacctgtaatcctagtgctttgagaggccaaggtggaaggatcgcttgaggccaggagttcacgaacagcctgggcaatgtagcaagactctgtctgtacagaaatttaaaaattagccaggcatggtcccagatactgaggaggctgagatggatcacttgagcccaggagtttgaaactacagggagctatgattgcaccactgccctccagcctggacaatagagcaaaaatatgtctttaaaatgatagtaacaataaaaataatttcaattcttcccttagctacctaccacagcagtgaacgtttatacttcacaaccactactactcagcttctctactttatgccagctaaaagtaggtgctatcccatggttttaacatctgttctgtttttcagtggtatcagctcctcttgttctaggtactgtcaaacctcaaatcccagtcctgatgcttctctccagggcctcttcccaactcttttgatggacatctctaggaggatttcatgccagcatttcaaacatgacaggagtgctggggtgaacggagggcacaaaacatacacatgagaaaagaaccagtggattcacacaattttggcttcaagtcaggaataatgaatgggacaaggtggaatgctacataagatgggcatgtagatctgataaagagtggcacaggttgggaaacaagggaggcttccacagaagggaagggcaaagggtgttctatagtgaaaaggcccagtggagcgggggcatagcactatttggggcttcagacagttaaagtcggtgctgcatgatgcctgggcttgtcttctcagtcttctctctttatcagacaaagaacaggaacttaacaaaatgtgttgcatggcaaaggaaaatagcggtgggataataggattgatttgggaagaggtggaggcagtgaattcagacaactccaaccacttcataaaggttctcaggtgcagccaggctttcctaagatgactgatctcatctgtgcctggtggcaggagagactgatcctcctcacaacccctatagaacagtggggctcccccacatctcagacacacataattatattatcattttattacacttttttttaaatagtagagacggggtcttgttatgttccacaggctggtcttgaactcctgggaccaagcaatcctcccacctctgcctcccaaagtgctgggattataggtgcaagtcaccacgcccggcctattttattccacttcggagaccgccccccttgtccctcagatgcatccaaatcaggagttagggatcatactccactgtggtcctgaattatagaataatgaagtcctagatgtcagcggcccctggctgcatgatagtaagagtatggctgagcctgtcttgcagatcatccagtacctgtacaggccaggctacactgttctccagcactctctgtagccaagtgccagtaatcacagactaggctacctctgctgggccagaaatagctgcctgaaccaggagctcacagcaccatccactctcatcaccaaagctatgcccaggagaagtcccacgctgctcacaatgaagcccacagcctcaaatatgaacctgcaaagaaaggcggagaatctcaggcaacagagtaggtctactgccttttccctgtagaggcaaaaccttggccatcctggatgtttaggatcttcatactttgttccaagtttctccctccccaccacctctacttctcaagcaaatctactcacttaggggcaaacactttccagaccatgagatgcctgcgaaggatggaggctgccaaggcacaggccagaatctagaggaggagaggaggggccacgttacttgtgaaggagaggaggaagcggagcaaaaggagagtttctataggcccctgtaaaaaatggaagcaggagaatagtgcatgtcagtggaaaaaatattgcatgtcctgggctaggagttaggagacctacttcctgccctgccccaagcactgactcactatgtgactttgggcaagtcagtatccatctgcaatgctaacactcaggctgtgcccccaggatggaggaagatatcagtgccacatctgcctctggaggaaaggaagaggatccatgaccacagtttgggaagaaaatcctggctatcacctcagtttttccagtctgtccactgatagagtaatcctcaaatgcaactagcggggtccagatctaggttgtagaggggaaatgatccaggactaggattaaggagacccaggttcaagtctcagaactgccatttgaggccactgggcttgggcaaccacttcacttatgtgaaactcagtcaaggctctctcccacggttttgaaggtctgaaagaaagtgatgcacacacagagaaaaaacaccaactccctgatctctctcctacacccacctgaataccaaggataaagaggtacttgaggcccagctgcagcagtgctgcatagaagtgctgaggcgcatcccggagccgcatctccatcagtggctcctcttcctcctcgggtctgactctggcatcagcttcattccctgggggctgctgtctcttccgcagcccttgactctcacacaggaaaggccagagcaggagcagtgggcaacctactgcctcaagagagggtatggctggaatcaacaggccaccctggctggctcaggttccaattagcctaggccaaggggtgccaaagatccaacaaacccatatctctccattcaaatccaggggtttcctttctttccacaaagccagagtaaacaatggaagcaagtgaaggaggagggggtacctgcaaagaggaggtgggaggcaaaggtgttggctcccactagcaaagcaggcagccaagtacaggagccatgaccctctgggaatcccacgaaggctgcatgccaatggatggctggaaagacaggctggtggcctgtggagtagaaggtctgtgtggccatgagggcccaagccgagactgcctgccatggcacagtaaaaggacctggaagaaaagatatgccacgttacagtcacttcttattccctaatccataggctactgctccacaatcatatactcctactacttcagtatcaattctcatacacactcacatgcctatcagcccaacctccttacagtcaacattctgttattctaattctctctgtggtacaaaagcgccatcaggcttatctgaatcctgctatggccaatctctttctttctctcaaacacatacagctcagtgccattatatattcacaatttactacttccatcactggaaaatcaagaaatgtgctcatgaggatgcagcatttccacagggagtcttagaggactccttgtctctcctctccatgaaccctgggaaccaacaggagggatcaatttgcttggctatggcaggtaagagagaggacaccaagaagaccttcctagttgtgtggggcatgggaccctctgtcaagctcaggaacatgaggagcaacacctccttgaaaacaagaggggccgaactcacatcactattgtctttaagtgaatcagagctgagatatttaccaggggtggtgacgggtatcccagcagcaagcagatgtaggagaaggaagctctgcagaaacagaagcaggaacacaaggctgatgcgctccgcatgcaacagcagaagtgggaaggccaacagggtgagggctgtgaccatagcagctgagtagacactccccaactgataagcagccacagtcaggggaccctgagatttggtcctctctaaccggccccggaactcctcctgcatgtgtcggtagatttgagggaccacataatccaagtcagcttgagaagtgggggggcctgagaagggagtgaggacagtcctggtccttggagcgcctgccccagccttcaccagcactgtcacaggcttccagagcagcagcgcgagccctgaagcagccagccctgctacagcccgaggcagcaccatggatgccccagagaccaggacccggagacgggggggagcctcatctgcccccgacgccaatgcccagtaggcagcagtacccaatgccattaggggcagtccccagcgcacaaagagcatgggtggctcggggctcttgagattaccatagcggcgaagccacaagcgcacggcagctaacagggccaccagcgccgccacacaagctccataccacaaattcttggctcgaccacccaccatggatgccagaggactcagccagggagaggagtggcaaacaggtgtctcttcagggcaacgatgaaaaagcccagctagccttgtacataaaagcaacccaattccaagcctcagggcatatgcaccattgtgccgtggggggtttgttgtggctgaagtgccaaggcggggcattgtgagtagcttaggtggaagcagctggccctcccagtgaagctggacaaccaggagcaggatgaatgagcccaaaaggaagggggtggccctggcctcagctacaacaaaactatcagagaagaacacagccaagcgaaacagcaggagtaacaggacgggcccagggatgggaaacagggttgccaggggcctcttggacccccagccagcccaggctttccacagaaaagggaggaatgagctcactgcagccacagcccctagaagcactagatctagcttcagctcaatagttcccaggagtccagcatacgctatggccccaaccaggccccaggccacaggtgtcaggagtagagggcagaatggaaagcctggggatattgcccactgagatgccagcaggcagataaagcaggaagcagccaagagagcagtaccccccgccatgcggaccagagagaaacgagcccaagactcgatgcacatggcccgagctccccgcaggaactgctgcagctcagcaatcacagtcggcagtgtcgcctcagcccccttggggctctggagaagccactggtagtcagcagaggccttggagaagaggttctgcagctgatgaagctccttagcttgaaggtcctgagtagcagctgagtaggtatgaagaaatcgggacacctggcagagaaaaggtcagaggccaaggggaacaggtcagagacataaattggggcagaggcaagaataggtattacaaaagggggtacctggaagtcaaggacccaaactctgtccagaatcggggaagggagggataacggaagagggataggtatggaaggtgggactaagactagtcaaaggacaaaagagtggttcattatgcttctttcatgcccaccctagctctgtcacctggaaacccagcccgctcacctacctgctgagcattgagatggagagctgaggcttgggctaaagcagaggagtggggctgggagtcctcaccccctgagaatagctcagccatcacttccccgatattcccaaatgggatgggcaggcccagcagcagggccagcgtgggcacaaggctaacttgaggaatcacctctggctcctaaaggaaaatgacagtggtcaacagattcatcacaaagctgaagtcaatgtttgggatggcagacataggggcctaggtaagaaatgagagtggaggatacccaggatcatggatttgggggcctaaaatagaggtattcatgaggatgctgtaatggtaacatgggctgattactgggagaacagatgaggaacatcccaggcctcacctctggtggggtgctggggaagactgctgtggggctatacagaaagagagcagctgagacctccagctcactgtcccctccatggtctccatttgtggtcatcccatggtccccagccactaccagcagtgtgtcattctccagacgctccacaagtcccctgggggccaataaatgtgtcaggagtagaaacggataaatatttttctcaaaaagaaaaaagatttttctccaggggcctattcatccccagctataactccattagtaaggcctagacctttggcaaagagacatgtcttcggccatgatcctgatgcccaaagctacacattgagttaatcaagatggatggagcctctagcttcagcagaaggcctagagaagacagaattcagccaggaaagaagctctaagataagagcttcttcgagattctcagacacaaacccactcccccagccaataccccacactcactggatcacctggtccatctggctaagtttcttggccatttcagggtggtgagggccatgcttgtggccacagtggtccacacccaggaagtgagcaatcagcacgtcccattcaccactgtccactgtgaaggggagaacactgagcacagaagactaagacccactcctcaaccccagccaggctttgacactcctctatgtccagggatacaagcccaggctgttacacccataggtggctcagaatttgtggactaaagcagttctccccagctcccagtcttagaactaagtgctctggccccatgctcactggtggggtagaggtgttccaggatgccattgtccactgtgtctaggtctctgacattgaaggatgggaagaagaaagctttggagaaagcaccagggaaaaggtctttccaggtatcatctcccatgaagactacacgccttcctgcagggacatgaaagagaagtcagagcctgagcaaacgtcagggttaggagaaaagaggaaaagaggccctttaaagacccatcagaagtcccaaccatgcaacctaaagtacagcaattccatacagcaatccttatccttcagggcctaacattttccaccaggaagctttccctgataaccgtactccacccagacctcacacttatccttcctacaaaatgctctcctagttctgtctctgggtatctctactgagttgtttttcctgggtgtatcctgcttcttcccagtcagtgaatgaacagggcctgtatttctctgctttcttctccacacttgcaagccaagatccacatcttctcttcttcccttctcccttttactgagaggtctccaagaataaaacttacactccattcagattagaagcttcataggaacaaagcccagatcccttctcctctgtctcccaaactgagctccctaccagcagggccctggcctctttcttctcctctgtcccccaaactgagctccctaccagcagggccctggcctctttcttctcctctgtccccctacaccataatcaagtgtgcatctgggcacccaaaggtctgactccctgacttcaaattttgaagaaatttgccaaggtacttctggccttcaaagtggcccacactgacctgcactggtgagctgcttaatgagattgtcttccactatggcgtggctggcgaagttactaccagcatcaataaaggtaggcagtgagccagtggtgagggccttgaggcgctgcatggtggtggtaggagggtcaacctgagatcggtagagccgggcatggtggggctgaatctccaggatcctctgcaaggagcttagtttgcccaggaagggtagggagacaggaggctctctaggcacgtgtgaatgctggggctgggcgaagtcaaatcgcagagcatctatcagcaccaacacaacccgcgaaaatcgggaagccatccagcaggccccaggtttcccttggctcccccatggcagggacccagggcctgggggctcttggcagctgctatggttggtgagctccaaacgggtgagcaggaagccactggtgaagagggcaatgccagcgtagaagaggaagcagacccaggccaggaagagcaacactgaggctttctgcatcctgataggggtggggaagtaaattcattactgtggggcaaagaaccagtggatattctggtccctgaatacaagcccagctagaatcacttcctcccggaaaccttcctggagataaaccatttcacagccaacccctcgcaatattactctcctcctatttccaggctgggcatggtggctcacgcctgtaatcccagcactttgggaggccgaggcgggcggatcacctgaggtgaggagttcgagaccagcctggccaaaatggcgaaaccccgtccctactaaaaatacaaaaatgggtggcgggcacctgtagtctcagctactggggaggctgacgcaggagaatcgcttgaatcggggaggcggaggttgcagtgagccgagattgaaccactgcactagagtctggacaacagagggagacgccgtttcatgaggtcccaccccagatctactgaatcaggatcttcgaggggtagagcataggaacgttcacatgtacaggcaggaaatgctaatgctgcctgtacatgtgaacagtcaggagggaaacttattccaattggtagtcaggctctcttacacgccgtttctgcgcctctcccctcgccaatctcaatacccagtggaaagggatcgaagccgcaggggaatccgggcccagccgacggcgccgcctggcgggcaccgaggggacgaaggggaggagtcactctccgcttccgggcggccaggttcgccaggagacctgaggcacgaccttcgccacgcaaggaggctggggcccgggtcgagagtcgactgggcctccgctgggacccaggcgtgcgaccggctctgcctcctccggtaactacccagcctcccgctgggcaccctagccgcggtactgagcaccttggttaggagctgaggggaagagggagactcccttacttcagggtgaggggaataccggggggtgaggttctcgggagaccctggctcacctgcaatggcacccggaagtgcggcggcggcggcgcctgcgacctggcagcacagagatgcgtgcgccagacagagtggcccgtcggtggctccatcgccatctgccggcacctcggtggaagtttggccaggagcgtggggctggccccagtttgatgggatatttagtaattgaaaattggggacaggggaccaagctggaggaagagttcagggaaccactgtccattcatggttacgactaagagcacggctgctggagtcaaacttgacttgaatcctagcttggccgcacatattgtcatcattaggcattacctcatctgtaaaatggagataatacttattttcccttttttgcttagctgagtccaactgagatttcattactcctcctttcaaagcctgtaactaaatcttacgactgaataattaagcaaataatccttcggagtggaggaggggaggctgggcccagtggttcacacctgtaatcccagcactttgggaggtcaaggcaggtggatcacctaaggtcaggagttcaagaccagcccggccaatatgacgaaacgccgtctctactgaaaatacaaaagttacccgggagtggtggcgggcgcctgtgatcccagatacctgggaggctgaggcaggagaatcactcgaacccaggaggcggaggttgcagtgagccgagattgcaccactgcactccagcctgggcaacagagcaagactccctctcaaaaaaaaaaaaaaaaaatgccaggcacgatgactcacacctgtaagcccagcactttgggaggctgaggctggagaatcagttgaagtcaggaattggagaccagcctggccaacatgctgaaaccccaactctactaaaaattacaaaatttagccaggcgtggcgatgtgtacctgtagtcccagctactgaggaggctgagactggagaattgcttgaagccaggaggcagaggctacagtgagctgagatcgtgctactgcactccagcctaggcgacagagcgagactctgtctcaaaaagaaacaaaacccgtccactggtttctcatctcagagtaaaagttcttgcattggctctacatggccctgcacactatctgcctcttccccttctgattcatctagctgccacttctttgcttccctaactctgttccatccacagcagttctgcctcaggacctttgcatttgccatctcctctgtcagcttcagttcccgatgccgaaatggatctccatcaccttcatattgaagctcaactgtaacatcagcaaggcttcctgcaatcccctactttactagttcagcacctcccaccaccacaccccctggaaaaatttcccctcacttccttaatttcttccatagcacaactcatcagcatctgaaattctacacgtatttatggtttataccctccgagtagaatgtgagctcattgaggtcagggaattctgttttcttcattatgatatcctcagcacctagcatatatttgaggttcacatactgaccaaacgaataaaggaatatgttaatttttaaaaaaagttgagttattctcccaccttcatccccatagccccttatctcagttcagacctcatcccttctccaggatcactgaggcagccttctcactgtcctcccagcctcctgtgtctccctactatcccttctccacattgcagcaagacagctctaactaaaacattaatgtgattactgttatttttttcttttttgtagagatagggtcttaccatgttgcccaggctggtcaactcctgggctcaagtgatcctcccacctcagcctcccaaagtgctgggatcacaggtatgagtcactgtgcctggccaatgtgatgttttatcttaaaattcttcatgggaagggaaaaaaacccttcataggccgggcacagtggctcacgcctgtaatcccagcactttgggaggctcaggcgggcagatcacgaggtctggagttcgagatcagcctgaccaacatggtgaaaccctgtctctacaaaaaacaaaaaaattagccaggtatggtggcgcatgcctgtaatcccagctactaaggaggctgaggcaggagaattgcttgaacccgggaggcggaggttgcagtgagccgagatcatgccattgcactccagcctggacaacagagggagacgctgtctcaaacaaacaaacaaaaaatccctattaccctagggataatgtccaaccccttcaacaagaatctcattccttgtgacttggcccttgccatgtagtcacatcccccttaacactatacccttcagccaacttctctcaagcagtgagcctttgtttattctagtccaggacctgacttggtgaaaacttgctaacttttccagcctgagttcagtggcaatcagcaacgctgctactcataagctgatatgctcttcccaccaagatccctcagccagaactttcctctaccacagcatttatcacttttttttttttttttaaacagagcgtctcactgttgccaggctggagtgcaatggcgtgatcacggctcactgcagcctccacctcccaggttcatgcaattctcctgcctcagcctcccaagcaactgggactacccgcacatgctaccacgcccagctagtttttgtatttttagtagacggggtttcaccatattggccaggatggtctcaatctcctgacctcatgatctgcacacctcggcctcccaaagtgctgggattacaggtgttgagccaccacgcccggccacatttatcactttctatcactgtctgcttcctgtctgttttccctacctgaccttgtattctgtgaaagcagggaccactgggtttcaggtatttttgtaatccagtgtctagtaatgagcttggcacttggtagacattcaatgtttttgaataaatgaatgaggagcaccctcagtccctgaaaaccctttaagtatgccagtgcagggtagtagtttctcatgaaagtacttctttcccacgaaaaaacccccaaacacctgcctcaaacacacagccccacacttagcaggaaggggacttcacttcccagccagcagttcagtgaacatatggtttaacacttccaccctatcccacagtttctcttgaagacaaaaatgatagtttcactttacaagaagttcactcttattcatggaggcatcatgctgacaggactggatccaaggaaaatgctagtgactttcccaacttcattccccaatcaaagaggacagtttctggtttgccactggtgagtttattacacgactaaagttcaaataaaaaaataaaaaccaaaatcttggcagggaagctagagccagaatcaggaaaatctgcttccttgtccccagactccctggccaagcccagctccactaactcatcttgactcgatcaagttcctcatcaagacttgcatctgtaccctggacatctctgctgctcccactggagagtgagtctggagtccctggcactggggctttggtgagggctccatatacacccatggcctgaggagaggaacagagagaataccatgaggacacttgacagaggtgcagcccagcctaccaatggctaaacgggaaaagatggcatgggggccagtaagttggttttcctttctccctctctcaaacctgtcttgtaagctctggagttgattttaggaatcttgcaaaccatcagagtaaagtgactctcagaataccagcacaagtatctaccaaaaaaaggtatctcaagaacttccatatttgcaggactgagtggagatgtttcattcttagattccatctctacaaagaacgaagggaggtctagggccaaggcactctgaagacctttatggtatgtaagtgttgatgacggtggtggggtctcagtttggtccctggcaccagtgctctgtgctgggtcctcagagagctctaacctgagccaccatgctggtgacatcgccagggttggagggcagtaggatagtgttggagtccttggccagtttggagaacgcgctgacatactgctcggccacagtcagtgaagctgctgcatctccattctgtgatcacagggggataaaaatcagagatcaccgatacggagaagaagggggggatggggaatgaagaaagcagttcacaataaaaaggaccatgtaatctggctcaacagagcccacagaggcggaactctcctcaagcgtagataagagaaccccttccactgtcaattcctgtccccattcccacccaggggcctctcacatgttgtgtcagagctgcagccaggattcgaatagcttcagctttagccttggccttcgccagaactgcactggcctctcctgcaagagaagggacagagcttgcttgacccatgaagtcaaagtaccccaaagatcctgccccagcaccaatcttcaaaggcccatgccttgctcctccctcagcctctaccctctcctgacctgctgcctgatttatctgttcagccttttctgcttcggaggccaggatctgggcctgtttcttcccttctgccacattgatggccgactctcgggtcccctcagactctagaactgtggcccgtttccgccgctctgcctccacctggaagcccacaacaatcccaatcaacaagccaagggagactgatacagacatgcaactctacccatcataacaggagggaagtctggatcctcctggtactggagccctgaggcccttttcccacccctccttggcccccacctgcatctgcatagactctttcacccggggtggcacatggatatccttgatctcataacggaggcagcggataccccagcagtcagcagcttggttgatggcatccacaatgctggcattcagggactcccgttcctggaaaaagaggtgtaagccccacagcctcaacctacctatcaagggcctacactgagaagggcctgggactgatcttgaccttcagaaaagattaagagtgtcaggtttgtgtcttcaaaccctaactctggctcagatctgcttacccggaagactttgtccagagagagtttgccgagctctgatctcatggttgtttgagctagctgggtgacggcatactcagggtcctccacaccgtagcttgcctgagatggacacggatagtgtaagaagcttgggcacaagattttagtgaagagggcaactgaaaaggctggataaagtaggggacaggtaccttgtaagggtccatgatgcgcaggtaaaggactccatcgatttgcagagttacattgtctgtagaaccaggagagaaaacggggaaagtcaggcctctaggtcccaaccagttctttctactaagctctggatctacagcaaccacatcctaatagcctcagagcacccatgtcaccctgaacccctcaccgagagtcacagccgactgctcaggcacgttgatgacaatttccttgagactctgcacatatcggatccggtctaacacagggatgaggatgttcaaaccctggaaagaggagtcatgggtcctcagaaggctgggaactattgggttgggacctaagctagtcctggagtatgtagggagtcaacacatggaacatgcccagaaaagcagcagctcctaccaagaaataagtcctcagaaggctgaggtgtcactggtaagaaaacccaagagaacaggaatgcaagactaggcccctgaatggaggggagagtcatgagaatcggagccagcagaatagccatctctatgcagactgagaggtagggctgagagtgggcaggggagattcccaagaatggggcctgtgagatgcataggaaaaggtggtaacatggggatgatggtcagcagcctgggccctgtcaggtctggcctacagagtcgggagctaacagtgcgggcaggcccaaaggaagtcctcccgacattgcatgtcgtgagggattggtcatctggctggcccagggtgggcagaagaggtttctcacaggctccaggatccggtggaatcggcccattcgctccaccacccaggcctcctgctgcggcacgaacagtaccacggtgtttcggggcaatccagaggaggcgcggcgcggagcgcggccagaagccagtagagagccctgaaggaaagaagagggtgagcagagatcccatctggccagacacgccgcccctcggtcctgaaggcatctccataaaccacgaccctcaggatcctcggagaatcacatggggaccatgacctctgaccccagtcctctccaaaagttggaatttcgctcttttccagcggagaacccaggtaatctctgtcctgaccctctggaaaggttgcctcgctctcaccctcagcaaaagggccccagtgccccgcgccgcgcgcgccagcatttcccaccgccgcagcgacctccggaaccaacgagacgagcggagcggtcgctcccagaagcctacccgagcctttcctcttgcagttccgctcccccggatgtacttccggcagctccctcccccgcttcaacactcacccaatcagcgttacttggtcgaacggcgcgtcaagttgttccctgggaaacgcagaccttctagagaagggcgaaggctgtggttgttctgggtttagctgttcacgccgaagatccccggcctgatggccaaaatggaggctatttttcgcgggcattatcactcagacaccacgcactgaattattcgtcctcacccgagactcagtttgcccaccagagcgtagtatcgcccccatctgtcaccatagcgactagtggattggagctgactcgttgccatggttgccatagtgatattctctggtagtcccgctgtgttgtgcccaggactcccactggggactgaccccaatcccgttgccatggaaactgggcctaatattgcctggcgattgggccgagattttcccctcccctctttcctcaaagacactgcagctccttccctgtcttcccaagcaaggtttgttatgcccggtcttaaatagagtccagcaaacagcctcaacgttcaaccttgtctggagcatgtcaccttgcccacatccctaatgctctggtagtcaagagacctccgtagtcacctccattttacatatgagggcactgaagttctgaggggctaaagtcattaatagaaccagtattagaatcctgatctacaattcagagttcagcttctacggctgaactttacccaccaacccctccgaaaggagaaaaaccaggccccaggaatcagcagggactagcctaagacctcatgggcccaggcctgttgcctctctggtagaaagggctgagtcccagctccaggaaggccctccatcccccttcacaccctctccccaacaacaacaacaacaacaaaagtagagcttagttcaagtttccaaacaagaatttattctttcttttttaatctttttttctaaaaaaaagtaccaggtacaattttttcctgtttttgatttgctttgttttttcaagtttcagcaaatgcttgttcccctcagcccagccccaggagttaggactgaggctgggtcagagtctggagtggggaatggggtagtttggaaccacatgactgagtttgaggggtgcccctcaccccagctgaggtaggtgggtcagagtctggccaggtgagaggaggcaccccagtgcttggccctgactctgccccctggacaccttcttcagtcaggaccccaaaacaaggagacacaggtaggaggagagggacaactggagtctggagccctaggtgaggggtggttaacccctgtgtgtgtgcatacatgcacactcacacacacataccacacaaagacaagcttgtgcacacacacatacgcataacttggctttcagagataggtcagagggtaggggaagtgaagggactggggaaggacaggggaagctgagtctttggctactgactcagtccctctggaatagcccctcttccctcagctgagggaaagcagttctcctcctgcccccaccgcataagcctcttcaactcctgaggttggagcaatatctgagagtgggaagcggggaggagtgatgccaattatcaggtgtgggaggttaccaaggcaatccaatttgaataaattataaattaaaaataaataaaataacaagtggcccctgcccaggacagggaggcaacgctggcataacttgcctgggaacttgagaaaatctcagggtagctccagttcctccctactacctaagctggcctgggaaacccaagggaggggacaggcacatggagtacccgaagtagggcagggtgtagtaagaatcagaagctttaaacacccaaataatccatttgggcgtgagcatggtgagggctttaattcaagcctgaagggtctcttgctgtctctccatatatgttctctaagatggagcaggatgggcaggtcattagcccgcatgggttcagagtgctggcaatcagggcaaaggtgaataacgtggattatgaggggcctcggtcacagcctgcagttcgtaggggagccctgtgtccagctccaggctccggcgggaaaaaagcaggcggatatctccatgcaggcttaagcggcctgagcgggagctccggaacctggaggaggacaatgtgatcaacgtaagaatccaggctgggttcagtggctcatgcctgtaattccagtgctttgggagacccaggtgggaggactgcttgagcccaggagttggagaccagcctaagcaacatagcgagaccccatctctaaaaataaatgaatacatacatatatatgtacatacatacataaaaatttaaaaataaactaagcaagaatccggacagtatcgaagcaaggagagatcctcttcagggaggggatacctgggcctccccagccatccctgggccctctcctcacctgaggtgcagcaagtagcagaggaggcggtgggtggggttagcatttccctcctcacccacaggcaccaaaaagaggcgatggcgcaggaaggtcatgtgggcagcaggcatgtccgagaagtcaaaggtcacaaggaacatctttaccacagtctggttggggttaaataaggtctagggacaggacagtcaaggttggtagggcctgagggctgctttcctctctccccactcccactccctcagggcaaactcaccacttggacggtgcccaccttgggcacgctgtaacccttcctccccaaggggttcagatccacgatgccctggaaggccagggagccatcagtcaaggtggggactaggaaaaccctgggccctaaacacatgtccctctccacaagctctcaccctgaacctgcccctgccctacagtagagttctcctcacctggccctgactcacttctaggtgaggaataagtaagaaatacctcttgccccctggccccgcccccaaatcctcatcctcttgatgagctgactttggggttggagtcaaggcataccaggaagggagccggggcattttgctcagaaacatcaaagaatgtgacagtgacaggcagcgtgacgtgctgggggcagtatgacccactagctccaatttctgctgtgaagccctcaatgtggccagatggtgcaaaacgtcctcgcagcaatgattcctgggattagggtagggaaaacacatgaagagagagatgccaattcttttccttatccatccaagccacattccaccatcccacctctcccaggaccccggcaatcacaaaccccaacgggagctacctcaaagttgcccagcagggtacggctgacagcaggggtaggaacaggggaggcactgggggggctcagcaggcctggccccttccggaggcttcgaagggggctcctggtagaggaagggaaacacagggggttggcttgaggtattctgggattcctgcttatgcccttggactccaccctctgccactatgtagggcttctgccctggggtcccctactcggatgctggaaagagtacagacttctgcccccattctcagggacagggtagaggaaaaagctggtcacttacagcttcaggcgacgggctcctttcagcctccgccccatgggaccgcagtctgttgggtcctacggagagaaatgattgggaaaagacacagggtgaaggccatgtatgttttggggcagaagctcatcacaaactctcaaaggaacaccctgccccccaggcctccacctttacccacacaaatatccacttaagagtacatgaaggacaggcgcagtggcttgagcgcctgtaatcacaacactttagaaggccaaggtgggtcgatgatttgagctcaggagttcgagaccagcttgggcaacatggcgaaaccccatttctaccaaaaataccaaaaattagctgggtgcaatgtcatgtgcctgtggtcccagatacttgggaggctgaggttggaggatcccttgagcctgggaggaggaggttgcagtcagctgagattgtgccactgcactccagcagtgatggagtgagatc

SEQ ID NO: 147 - DNA, 2192 bp, Homo sapiens
tagttccgtcgcagccgggatttgggtcgcggttcttgtttgtggatcgctgtgatcgtcacttgacaatgcagatcttcgtgaagactctgactggtaagaccatcaccctcgaggttgagcccagtgacaccatcgagaatgtcaaggcaaagatccaagataaggaaggcatccctcctgaccagcagaggctgatctttgctggaaaacagctggaagatgggcgcaccctgtctgactacaacatccagaaagagtccaccctgcacctggtgctccgtctcagaggtgggatgcaaatcttcgtgaagacactcactggcaagaccatcacccttgaggtggagcccagtgacaccatcgagaacgtcaaagcaaagatccaggacaaggaaggcattcctcctgaccagcagaggttgatctttgccggaaagcagctggaagatgggcgcaccctgtctgactacaacatccagaaagagtctaccctgcacctggtgctccgtctcagaggtgggatgcagatcttcgtgaagaccctgactggtaagaccatcaccctcgaggtggagcccagtgacaccatcgagaatgtcaaggcaaagatccaagataaggaaggcattcctcctgatcagcagaggttgatctttgccggaaaacagctggaagatggtcgtaccctgtctgactacaacatccagaaagagtccaccttgcacctggtactccgtctcagaggtgggatgcaaatcttcgtgaagacactcactggcaagaccatcacccttgaggtcgagcccagtgacactatcgagaacgtcaaagcaaagatccaagacaaggaaggcattcctcctgaccagcagaggttgatctttgccggaaagcagctggaagatgggcgcaccctgtctgactacaacatccagaaagagtctaccctgcacctggtgctccgtctcagaggtgggatgcagatcttcgtgaagaccctgactggtaagaccatcaccctcgaagtggagccgagtgacaccattgagaatgtcaaggcaaagatccaagacaaggaaggcatccctcctgaccagcagaggttgatctttgccggaaaacagctggaagatggtcgtaccctgtctgactacaacatccagaaagagtccaccttgcacctggtgctccgtctcagaggtgggatgcagatcttcgtgaagaccctgactggtaagaccatcactctcgaggtggagccgagtgacaccattgagaatgtcaaggcaaagatccaagacaaggaaggcatccctcctgatcagcagaggttgatctttgctgggaaacagctggaagatggacgcaccctgtctgactacaacatccagaaagagtccaccctgcacctggtgctccgtcttagaggtgggatgcagatcttcgtgaagaccctgactggtaagaccatcactctcgaagtggagccgagtgacaccattgagaatgtcaaggcaaagatccaagacaaggaaggcatccctcctgaccagcagaggttgatctttgctgggaaacagctggaagatggacgcaccctgtctgactacaacatccagaaagagtccaccctgcacctggtgctccgtcttagaggtgggatgcagatcttcgtgaagaccctgactggtaagaccatcactctcgaagtggagccgagtgacaccattgagaatgtcaaggcaaagatccaagacaaggaaggcatccctcctgaccagcagaggttgatctttgctgggaaacagctggaagatggacgcaccctgtctgactacaacatccagaaagagtccaccctgcacctggtgctccgtctcagaggtgggatgcagatcttcgtgaagaccctgactggtaagaccatcaccctcgaggtggagcccagtgacaccatcgagaatgtcaaggcaaagatccaagataaggaaggcatccctcctgatcagcagaggttgatctttgctgggaaacagctggaagatggacgcaccctgtctgactacaacatccagaaagagtccactctgcacttggtcctgcgcttgagggggggtgtctaagtttccccttttaaggtttcaacaaatttcattgcactttcctttcaataaagttgttgcattccc

SEQ ID NO: 148 - DNA, 1991 bp, Homo sapiens
cctctccccgcgcccgctccctctttccatcccctgccgcccgcagccaccccggggccggccatccgcgcgcgcatccccgggttcggcccgtccctggccctcgagggagccgccgccttcatcgccacatctgcagcggccgcaccagaggcgcgtgtgtggaccccagtcttgacgatcgggcgccccctaggagtgccacacccccggagcccccctcaacacggaccgcgccccgccggcacacaagaatggtcactatctgggggcatggagtctcaggtgggggggggcccggccggccggcctgcccaacggccactccttggtacaaatggagccactgacgacagcaagaccaacctcatcgtcaactacctgccccagaacatgacccaggatgagttcaagagtctcttcggcagcattggcgacatcgagtcctgcaagttggttcgggacaagatcacagggcagagccttggctacgggtttgtgaactattctgaccccaatgatgcagacaaagccatcaacaccctcaacggcctcaaattacagacgaagaccatcaaggtgtcctatgccagacccagttcagcatccatccgggatgcgaacctgtacgtcagcgggctccccaagaccatgagccagaaagagatggagcagctcttctcccagtacggccgcatcatcacgtcccgcatcctggtggaccaggtcacaggtgtctctcggggtgtgggattcatccgctttgacaagaggattgaggccgaagaggctatcaaaggactgaatgggcagaagccgctgggcgcacgtgagcccatcacagtcaagttcgcgaacaacccaagtcagaagacggggcaggcgctgctcacccacctctaccagtcatccgcccggcgctacgcaggccccctacaccatcagacccagcgtttccggctggacaatttgctcaacatggcctacgcggtcaagaggttctcgccgatcgccatcgatggtatgagcggcctggcgggcgtgggcctgtcggggggcgccgcgggcggctggtgcatcttcgtgtacaacctgtcaccggagccagaccagagcgtgctgtggcagctgttcgggccttttggggcagtcaccaacgtcaaggtcatccgtgatttcaccaccaacaagtgcaagggtttcggcttcatgaccatgaccaactatgacgaggcggccatggccatcgccagcctgaacggctatcgcctggggcagcgcgtgctgcaggtctccttcaagaccagcaaacagcacaaggcgtgagcccaccccgcctgccctcccacccctccccgggcagcagagagagagagagagaagagagagagagagagagaaaggggcccaagagagacagcacaggcagccccacggacgacgcgagggccccacgtcctgcgaagccacagggtgagcactctggggtgggagggtctgcagggaattgggggggtgcccggggatcccccgccccatcctgcccccacccaggctgggctgttcactctctcgtcttggtttggttcatggtgaaggtttttgtttcttttttcggctaaaagaatgcagagatgtgcccccacccccaccctcgaccaccccgatggatggcttgggggctcaggggtgcctccagacccctttagccagcctccccagcacctaggtggggcctggggtaggaggaacaggtttaaaaatccccaaaaaagcgaaccgtgaggaggtgtggcacccccggcccagtgccccctggtggaatgcgggggagcaggcagtggggctggaagcagaaacaaaatgaaaaaaaaaaggggggtgggaggggaagaaaaactctatttttgtaaaaagggaaaaagacctcgaggagaatttttactggggattcttgaacttgaaaaaaaaaaacacaaaaaagggaattc

SEQ ID NO: 149 - DNA, 1050 bp, Homo sapiens
cggtgagcgcggcccgggccggacatggcggcgctctacgcctgcaccaagtgccaccagcgcttccccttcgaggcgctgtctcaggggcagcagctgtgcaaggaatgtcggattgcacaccctgttgtgaagtgcacctactgcaggactgagtaccagcaggagaggctagagtgcaatggcacgatctcggctcactgcaacctccacctcccaggttcaagcgattctcctgcctcatcctcccgagtagctgggattacaggcattaaaaccaatacaatatgcaagaaatgtgctcagaacgtgcagttgtatggaacgcccaaaccttgtcagtattgcaacataattgcagcatttattgggaataaatgccagcgctgcacaaattcagaaaagaagtatggaccaccctattcttgtgaacagtgcaagcagcagtgtgcatttgacaggaaagatgatagaaagaaggtagatgggaaattgctgtgctggctgtgcacactttcatacaaacgggtccttcagaagaccaaagagcagaggaaacacctgagtagctcttctcgtgctggccaccaggagaaggagcagtatagtcgcctgagtggtggtggccattataacagccagaaaacactttctacatcttcaattcaaaatgaaatcccaaagaaaaagtccaagtttgagtcaatcacaactaatggagacagcttctccccagacctggctctggactcaccaggcactgaccactttgtcatcattgcccaactgaaggaagaagtggctaccctgaagaagatgttgcatcaaaaggatcaaatgattttagagaaagagaagaagattacagagttgaaggctgattttcagtaccaggaatcgcagatgagagccaaaatgaaccagatggagaaaacccacaaagaagtcacagaacaactgcaggccaaaaaccgagagctcctgaagcaggcagctgctttgtccaagagcaagaagtcagagaagtcaggagctataacctctccatga

SEQ ID NO: 150 - DNA, 645 bp, Homo sapiens
ttttatttagcattcttacacactacacaaaataaatacttggataactcacgtctaacaaactaaactatatatgtattttttccataggaaagcacaaggagaagacagaaatatcaagagtctcaagaacctttgaatgaagtaaacagtttcccacaaaaaatcagctatacacaattcccaaactcattttatgagcctcatcaagattttaccagtccagatatattcaagaagtcaagatctccatcttggtataaatacacttccacagtcagcacggggatcacagacttagaaagttcaactggactttggcctacaatttcccagtttactcttagtgaagagacaaacgcagatgtttattattatcgcatcatcatacctgtccttttgatgttagtatttcttgctttattttttctctgaagatgataccaaaattccttttgataattttttaagtttccagctcttcaccgaaatgttgtattcttatttcagtgtttccttccagacatttttaaggtaattggcttactacaatatggacattcaccaaatatgatgttaaaactctgtctactagttagtagtcctctcagccactcatataagcatatttgatggaaaggttgt

SEQ ID NO: 151 - DNA, 4240 bp, Homo sapiens
cagcagagctggattggggtgttgagtccaggctgagtagggggcagcccactgctcttggtccctgtgcctgctgggggtgccctgccctgaactccaggcagcggggacagggcgaggtgccaccttagtctggctggggaggcggacgatgaggagtgatggggcaggcatgcggccactccatcctctgcaggagccagcagtacccggcagcgcgaccggctgagccgcggggccagcaggtcttcctcaagccggacgagccgccgccgccgccgcagccatgcgccgacagcctgcaggacgccttgctgagtctgggctctgtcatcgacatttcaggcctgcaacgtgctgtcaaggaggccctgtcagctgtgctcccccgagtggaaactgtctacacctacctactggatggtgagtcccagctggtgtgtgaggaccccccacatgagctgccccaggaggggaaagtccgggaggctatcatctcccagaagcggctgggctgcaatgggctgggcttctcagacctgccagggaagcccttggccaggctggtggctccactggctcctgatacccaagtgctggtcatgccgctagcggacaaggaggctggggccgtggcagctgtcatcttggtgcactgtggccagctgagtgataatgaggaatggagcctgcaggcggtggagaagcataccctggtcgccctgcggagggtgcaggtcctgcagcagcgcgggcccagggaggctccccgagccgtccagaaccccccggaggggacggcggaagaccagaagggcggggcggcgtacaccgaccgcgaccgcaagatcctccaactgtgcggggaactctacgacctggatgcctcttccctgcagctcaaagtgctccaatacctgcagcaggagacccgggcatcccgctgctgcctcctgctggtgtcggaggacaatctccagctttcttgcaaggtcatcggagacaaagtgctcggggaagaggtcagctttcccttgacaggatgcctgggccaggtggtggaagacaagaagtccatccagctgaaggacctcacctccgaggatgtacaacagctgcagagcatgttgggctgtgagctgcaggccatgctctgtgtccctgtcatcagccgggccactgaccaggtggtggccttggcctgcgccttcaacaagctagaaggagacttgttcaccgacgaggacgagcatgtgatccagcactgcttccactacaccagcaccgtgctcaccagcaccctggccttccagaaggaacagaaactcaagtgtgagtgccaggctcttctccaagtggcaaagaacctcttcacccacctggatgacgtctctgtcctgctccaggagatcatcacggaggccagaaacctcagcaacgcagagatctgctctgtgttcctgctggatcagaatgagctggtggccaaggtgttcgacgggggcgtggtggatgatgagagctatgagatccgcatcccggccgatcagggcatcgcgggacacgtggcgaccacgggccagatcctgaacatccctgacgcatatgcccatccgcttttctaccgcggcgtggacgacagcaccggcttccgcacgcgcaacatcctctgcttccccatcaagaacgagaaccaggaggtcatcggtgtggccgagctggtgaacaagatcaatgggccatggttcagcaagttcgacgaggacctggcgacggccttctccatctactgcggcatcagcatcgcccattctctcctatacaaaaaagtgaatgaggctcagtatcgcagccacctggccaatgagatgatgatgtaccacatgaaggtctccgacgatgagtataccaaacttctccatgatgggatccagcctgtggctgccattgactccaattttgcaagtttcacctatacccctcgttccctgcccgaggatgacacgtccatggccatcctgagcatgctgcaggacatgaatttcatcaacaactacaaaattgactgcccgaccctggcccggttctgtttgatggtgaagaagggctaccgggatcccccctaccacaactggatgcacgccttttctgtctcccacttctgctacctgctctacaagaacctggagctcaccaactacctcgaggacatcgagatctttgccttgtttatttcctgcatgtgtcatgacctggaccacagaggcacaaacaactctttccaggtggcctcgaaatctgtgctggctgcgctctacagctctgagggctccgtcatggagaggcaccactttgctcaggccatcgccatcctcaacacccacggctgcaacatctttgatcatttctcccggaaggactatcagcgcatgctggatctgatgcgggacatcatcttggccacagacctggcccaccatctccgcatcttcaaggacctccagaagatggctgaggtgggctacgaccgaaacaacaagcagcaccacagacttctcctctgcctcctcatgacctcctgtgacctctctgaccagaccaagggctggaagactacgagaaagatcgcggagctgatctacaaagaattcttctcccagggagacctggagaaggccatgggcaacaggccgatggagatgatggaccgggagaaggcctatatccctgagctgcaaatcagcttcatggagcacattgcaatgcccatctacaagctgttgcaggacctgttccccaaagcggcagagctgtacgagcgcgtggcctccaaccgtgagcactggaccaaggtgtcccacaagttcaccatccgcggcctcccaagtaacaactcgctggacttcctggatgaggagtacgaggtgcctgatctggatggcactagggcccccatcaatggctgctgcagccttgatgctgagtgatcccctccaggacacttccctgcccaggccacctcccacagccctccactggtctggccagatgcactgggaacagagccacgggtcctgggtcctagaccaggacttcctgtgtgaccctggacaagtactaccttcctgggcctcagctttctcgtctgtataatggaagcaagacttccaacctcacggagactttgtaatttgcttctctgagagcacaggggtgaccaatgagcagtgggccctactctgcacctctgaccacaccttggcaagtctttcccaagccattctttgtctgagcagcttgatggtttctccttgccccatttctgccccaccagatctttgctcctttccctttgaggactcccaccctttgggtctccaggatcctcatggaaggggaaggtgagacatctgagtgagcagagtgtggcatcttggaaacagtccttagttctgtgggaggactagaaacagccgcggcgaaggccccctgaggaccactactatactgatggtgggattgggacctgggggatacaggggccccaggaagaagctggccagaggggcagctcagtgctctgcagagaggggccctggggagaagcaggatgggattgatgggcaggagggatccccgcactgggagacaggcccaggtatgaatgagccagccatgcttcctcctgcctgtgtgacgctgggcgagtctcttcccctgtctgggccaaacagggagcgggtaagacaatccatgctctaagatccattttagatcaatgtctaaaatagctctatggctctgcggagtcccagcagaggctatggaatgtttctgcaaccctaaggcacagagagccaaccctgagtgtctcagaggccccctgagtgttccccttggcctgagccccttacccattcctgcagccagtgagagacctggcctcagcctggcagcgctctcttcaaggccatatccacctgtgccctggggcttgggagaccccataggccgggactcttgggtcagcccgccactggcttctctctttttctccgtttcattctgtgtgcgttgtggggtgggggagggggtccacctgccttacctttctgagttgcctttagagagatgcgtttttctaggactctgtgcaactgtcgtatatggtcccgtgggctgaccgctttgtacatgagaataaatctatttctttctaccaaaaaaaaaaaaaaaaaaa

SEQ ID NO: 152 - DNA, 2306 bp, Homo sapiens
agcggggggagtggggaggaggggggtcggccgccgcagccatggaggccaactggaccgcgttcctgttccaggcccatgaagcttcccatcaccaacagcaggcagcacagaacagcttgctgcccctcctgagctctgccgtggagccccctgatcagaaaccattgcttccaataccaataactcagaaacctcagggtgcaccagaaacattaaaggatgccattgggattaaaaaagaaaaacccaaaacttcatttgtgtgcacttactgcagtaaagctttcagggacagctatcacctgaggcgccacgaatcctgccacacagggatcaagttggtgtcccggccaaagaaaacccccaccacggtggttccccttatctctaccatcgctggggacagcagccgaacttcgttggtctcgaccattgcaggcatcttgtcaacagtcactacatcttcctcgggcaccaaccccagtagcagtgccagcaccacagctatgccagtgacccagtctgtcaagaaacccagtaagcctgtcaagaagaaccatgcttgtgagatgtgtgggaaggccttccgagatgtgtaccatctcaatcgacacaagctctcccattcagatgagaaaccctttgagtgtcctatttgtaatcagcgcttcaagaggaaggaccggatgacttaccatgtgaggtctcatgaaggaggcatcaccaaaccctatacttgcagtgtttgtgggaaaggcttctcaaggcctgaccacttaagctgtcatgtaaaacatgtccattcaacagaaagacccttcaaatgccaaacgtgcactgctgcctttgccaccaaagacagactgcggacacacatggtgcgccatgaaggcaaggtatcatgtaacatctgtgggaagctcctgagtgcagcatacatcaccagccacttaaagactcatgggcagagccaaagtatcaactgtaatacatgtaaacaaggcatcagtaaaacatgcatgagtgaagagaccagtaaccaaaagcagcagcagcagcagcagcagcaacaacaacaacaacaacatgtgacaagctggccagggaagcaagtagaaacactcagactgtgggaagaagctgttaaagcaaggaagaaagaagctgctaacctgtgccaaacctccacggctgctacgacacctgtgactctcactactccattcagtataacatcctctgtgtcgtctgagactatgtcaaacccagtcacagtggcagctgcaatgagcatgagaagtccagtaaatgtttcaagtgcagttaacataaccagcccaatgaacatagggcatcctgtaactataaccagtccattatccatgacctctcctttaacactcactaccccagtcaacctccccacccccgtcactgccccagtgaatatagcacaccctgtcaccatcacatctccaatgaatctacccacacctatgacattagccgcccctctcaatatagcaatgagacctgtagagagcatgcctttcttgccccaagctttgcctacatcaccgccttggtaaacagtattataaaatcaaaatatgggtaaaagtaaatatttaccagcaacttaacttttagttgattaaagcaaaaagtaaaccatgaaattgggagattttattacattagttaataagagtgtggtagcatttttctccaatttggctgggattattcaaagtagggtgtgtatgtaacttatcactggaccactttagtttaatcagaaattccttttagctgacaacattgcttaaacaggatagtagttggcaagatgaaatgccagaattaaaaccaatcataagtagaacccacttcaaaataaaaaaacagcattactatttctaatcccaaggaatcactttattgtaaacactagcagaactcttctccctatacaaggtggatggctgattttaacctgaaattttaaatccacagattgagagctagtgtagaattgtctgtgtttattgtttttatgagtaaatacatgcattgtcataataaaatgcatttcagagaatatgcattttacctttgggaatatgttaatttcaggcagcattccctatgggaaaggtgataccagctctgatatgcaaagcatatgataatttatcattctaacttcaacgtataatagggattgtgacctgatatttggagatgtaaatattgctcagcatattaatcccgatggaatatagcattgtagttgacttttt

SEQ ID NO: 153 - DNA, 4089 bp, Homo sapiens
cgcgttcacagccccagcgcaggtctggatgtaccgactgcttttggaataaaaagattcccaggatgtgagcaacacgggaccgatatgatgcttcctggtgtgtttagtggttggtgccattccaattttctgtgctgaaatcattctgaaaactcaaacagtagacttcagcacacaaggaaagccaaagccatttgagggggaataaagccaaaagcctttcaccttattcgttccaagaatctcaccgccccctccttatccccctccaaaaataagccattgcacacagacaggcagcatggctagcaaacgaaaatctacaactccatgcatggttcggacatcacaagtagtagaacaagatgtgcccgaggaagtagacagggccaaagagaaaggaatcggcacaccacagcctgacgtggccaaggacagttgggcagcagaacttgaaaactcttccaaagaaaacgaagtgatagaggtgaaatctatgggggaaagccagtccaaaaaactccaaggtggttatgagtgcaaatactgcccctactccacgcaaaacctgaacgagttcacggagcatgtcgacatgcagcatcccaacgtgattctcaaccccctctacgtgtgtgcagaatgtaacttcacaaccaaaaagtacgactccctatccgaccacaactccaagttccatcccggggaggccaacttcaagctgaagttaattaaacgcaataatcaaactgtcttggaacagtccatcgaaaccaccaaccatgtcgtgtccatcaccaccagtggccctggaactggtgacagtgattctgggatctcggtgagtaaaacccccatcatgaagcctggaaaaccaaaagcggatgccaagaaggtgcccaagaagcccgaggagatcacccccgagaaccacgtggaagggaccgcccgcctggtgacagacacagctgagatcctctcaagactcggcggggtggagctcctccaagacacattaggacacgtcatgccttctgtacagctgccaccaaatatcaaccttgtgcccaaggtccctgtcccactaaatactaccaaatacaactctgccctggatacaaatgccacgatgatcaactctttcaacaagtttccttacccgacccaggctgagttgtcctggctgacagctgcctccaaacacccagaggagcacatcagaatctggtttgccacccagcgcttaaagcatggcatcagctggtccccagaagaggtggaggaggcccggaagaagatgttcaacggcaccatccagtcagtacccccgaccatcactgtgctgcccgcccagttggcccccacaaaggtgacgcagcccatcctccagacggctctaccgtgccagatcctcggccagactagcctggtgctgactcaggtgaccagcgggtcaacaaccgtctcttgctcccccatcacacttgccgtggcaggagtcactaaccatggccagaagagacccttggtgactccccaagctgcccccgaacccaagcgtccacacatcgctcaggtgccagagcccccacccaaggtggccaaccccccgctcacaccagccagtgaccgcaagaagacaaaggagcagatagcacatctcaaggccagctttctccagagccagttccctgacgatgccgaggtttaccggctcatcgaggtgactggccttgccaggagcgagatcaagaagtggttcagtgaccaccgatatcggtgtcaaaggggcatcgtccacatcaccagcgaatcccttgccaaagaccagttggccatcgcggcctcccgacacggtcgcacgtatcatgcgtacccagactttgccccccagaagttcaaagagaaaacacagggtcaggttaaaatcttggaagacagctttttgaaaagttcttttcctacccaagcagaactggatcggctaagggtggagaccaagctgagcaggagagagatcgactcctggttctcggagaggcggaagcttcgagacagcatggaacaagctgtcttggattccatggggtctggcaaaaaaggccaagatgtgggagcccccaatggtgctctgtctcgactcgaccagctctccggtgcccagttaacaagttctctgcccagcccttcgccagcaattgcaaaaagtcaagaacaggttcatctcctgaggagcacgtttgcaagaacccagtggcctactccccaggagtacgaccagttagcggccaagactggcctggtccgaactgagattgtgcgttggttcaaggagaacagatgcttgctgaaaacgggaaccgtgaagtggatggagcagtaccagcaccagcccatggcagatgatcacggctacgatgccgtagcaaggaaagcaacaaaacccatggccgagagcccaaagaacgggggtgatgtggttccacaatattacaaggaccccaaaaagctctgcgaagaggacttggagaagttggtgaccagggtaaaagtaggcagcgagccagcaaaagactgtttgccagcaaagccctcagaggccacctcagaccggtcagagggcagcagccgggacggccagggtagcgacgagaacgaggagtcgagcgttgtggattacgtggaggtgacggtcggggaggaggatgcgatctcagatagatcagatagctggagtcaggctgcggcagaaggtgtgtcggaactggctgaatcagactccgactgcgtccctgcagaggctggccaggcctagacagggaagtctgttagaactgctgtgctgatcaacgggacgctccgtctttgaagaaagaagagatggtctctccccagccatgggccacccttgccagtgactccaagtggaactacttagctcgcgtgtgcctggagggtgcgggaagtccagcgactctcagacgcacctcccagaggaccggtgggaattgttcatagtgccaaagtcctactactgcgttttcagtgggtccttgtacatagtttgctcctctgccctagccctcacctcttgctatactggaaccgatttgtacaatgtgggaattttgttacctttttaatcaagggcaacttccttttccagcactaccattgtaaggtttttttcaggagggagggctaaccaccttgcttttctcttttctctttttcttttttttatttttgttttattaatttggggaaaggggtgttagcattagtgccatgatatctactggattttaagtagggagactttatttttaaaggtaggttgaaatttgggagatttctcggcaggaagggctgaaatccaggcccctgtctcaacttggagagaggtgacagacggcagatcttccaaatcaaattcctttccagttcttcccctggctgcctttttgggggtccctgccttagccccacacaaggctttctgaactgccaagaggggatctggcttctcaactgctcggcctcttgggccaggctgtgcccagccagccctgggagaactgggtagcaggtggctgacttctttaagcacctttctaaataccagcagaagaggctcccgcctctgttagcatgatcagtactattgtgacattaaaacaacaacaataagatcttcctatctggagggtacagaggtgaatggctttggttttcatttctcttcttcactgccttttctcggtgtggtatttgacaagattttagctcaaagcctcaccatgaattgattttttttgtttgtgtgtgtgtttgttttgggacaattttagatacctgagtgcactttttcagttagtcctaacttttaaaagaaggaaaaccaagagacatatctggtgtacgtgttgcagtatgaactctggttgcaatccctccccctcccacactgccccccatttgagtacgccgcacaagtcaaacgctaggaagtttgaataaaaccaatttttctaacttgttgctcatttgttgtaactcaataaagcaaagactaaacatttttat

SEQ ID NO: 154 - DNA, 598 bp, Homo sapiens
  misc_feature (365)..(365): n is a, c, g, or t
  misc_feature (547)..(547): n is a, c, g, or t
  misc_feature (572)..(572): n is a, c, g, or t
taaaacttccaagaatctttattgaacttgctcagcatcaagcacgtgtctgaaggagccagggtggaaaaaaaaaagtgcccactggcgacagggagggccccagctggcagaccccccaaccacatcagaggagttttcatttcttcctgggctgcttatctgggaagccttcaaagaattcgttacacatcatggcgatgcaggacaggaagacacagtactcttggaagtccacctcgttgtccctgttgctgtccaagttgctcatcagcttctggaaagcagcttcatctgtccttttccccaagaagctgggcagctcccgggtcagcagctcctttagttctgacttgttgagcttngaacttgtcaccctctttgcccgagtacttgtggaaggtggacacatcacatccagggccttctccagaagggcacgccatgacagcagtcaggatcaacacgtactatagcaacagcgtgtgcaagcccacatctcagaagcacctggagagctcaaattcagtcaattgctcacttttcnggtttgttttttcctccgtctaagngcatgtgtgtgtgtgcatgaaaccca

SEQ ID NO: 155 - DNA, 2446 bp, Homo sapiens
gcgccgcggcgcggagtcccggctgcgggatagaccgagggccatggccgcctctcccggacccgccggcgttggcggcgccggagcagtctacggctccggctcttcgggcttcgccctcgactcgggactggagatcaaaactcgctcggtggagcagacgctactcccgctggtttctcagatcaccacgcttattaatcataaagataataccaaaaagtctgataaaactctgcaagcaattcagcgtgtaggacaagctgtcaacttggcagttggaagatttgttaaagtaggagaagctatagccaatgaaaactgggatttgaaagaagaaataaatattgcttgtattgaagctaaacaagcaggagaaacaattgcagcacttacagacataaccaacttgaaccatctggaatctgatgggcagatcacaatttttacagacaaaacaggagtgataaaggctgcaagattacttctttcttcagtgacaaaagtgttgttgctggcagaccgagtagtcattaaacagataataacatcaagaaataaggttctcgcaactatggaaagactagagaaagtgaatagctttcaagagtttgtccaaatattcagtcaatttggaaatgaaatggtggagtttgcacatctgagtggagatagacaaaatgatttgaaagatgaaaagaaaaaggcaaaaatggcagcagctagggcagttcttgaaaagtgtacaatgatgcttctcacagcttcaaagacatgtctgaggcatcctaactgcgaatcagcccataaaaacaaagaaggagtatttgaccgtatgaaagtggcattggataaggtcattgaaattgtgactgactgtaaaccgaatggagagactgacatttcatctatcagtatttttactggaattaaggaattcaagatgaatattgaagctcttcgggagaatctttattttcagtccaaagagaacctttctgtgacattggaagtcatcttggagcgtatggaggactttactgattctgcctacaccagccatgagcacagagaacgcatcttggaactgtcaactcaggcgagaatggaactgcagcagttaatttctgtgtggattcaagctcaaagcaagaaaacaaaaagcatcgctgaagaactggaactcagtattttgaaaatcagtcacagtcttaatgaacttaagaaagaacttcatagtacagcgacacagctggcagcagatctattaaaataccatgctgatcatgtggttctaaaagcattaaaacttactggagtagaaggaaatttagaagctttggctgaatatgcctgtaaactctctgaacagaaagagcagcttgttgagacctgtcgattgttacgacacatatctgggacagaacctctggaaataacctgtatacatgcagaggagacatttcaggtgactggccaacagataatttctgctgctgaaacattgacattgcatccatctagtaaaattgctaaagaaaacctagatgtattttgtgaagcttgggaatcccaaattagtgacatgtcaacactgctgagagaaatcaatgacgtgtttgaaggaagacgaggagagaagtatggctacctttcacttccaaagccaatgaagaataatgcaaacctgaaatcattaaagccagacaagcctgactctgaggagcaagccaagatagcaaagcttggacttaagctgggtttgctcacctctgacgctgactgcgaaattgagaagtgggaagatcaggagaatgagattgttcaatatggacggaacatgtccagtatggcctattctctgtatttatttactagaggagaggggccactgaaaacttcccaggatttaattcatcaactagaggtttttgctgcagagggtttaaagcttacttccagtgttcaagctttttcaaaacagctgaaagacgatgacaagcttatgcttctcctggaaataaacaagctaattcctctatgccaccagctccagacagtaactaagacttctttgcagaataaagtatttctaaaggttgacaagtgtattacgaagacaagatccatgatggctctcttagtccaacttctttcactttgttataaactgctgaagaagcttcagatggaaaataacggatgggtctcagttacaaataaggacactatggatagtaaaacttgagaagcttttggggtcagatctctggaacatcatgtgatgaagctgacatttttaaaaatcaaatgatcctttatcttttcagaaattcatcaattttataaagaaaacaatattgaaattttgctctattttctgatcatgaaactgattgtaaagctttttgacaactaataaatgtcttggtaattgctagattct

SEQ ID NO: 156 - DNA, 2595 bp, Homo sapiens
ctgaaggtaaaattttccagatacggcagacggctttcagagtacaataaacagggaatgagaactatttacatggaagtttctttctcatgatgcggtggagaagcctcggccacttggttctgccagatgttcctggggttactgtaaatgggaaggacaggcagagctaaacaaggtttatcatttaaaagtgcctgytgtgaagtcacttttgctggaaaactgcagcttggagctttctttgtattcacatcccactcttctgtcaagtacactttaccctgaccttatgagtggatgaagatacctcagttgtctgactttgccaattgcttaatttcagaatttaaaaaggggaaagaaaaacatcctgctaaaatatgaacatctgagtgtcttattttccaacatcgtcaatagctgtgagcgtcagcattaaatattctcccaaggagtgccatgatattgaagtcactttattaataacagctgtatctgcaaaacagtcaagagactcggacgttgaaagccagagatgacactgagcatgcttttattgcggcctaccatctttaagtgggacatattgattgatgagtgattgcctgtccatacactctctcatcatcctgttccttggattggacttcactaagcaatttatcactcaccttcagacttacatgtgggagttttcacaacagtagttttggaatcattagaacttggattgatttcatcatttaacagaaacaaacagcccaaattactttatcaccatggctttgaacgttgccccagtcagagatacaaaatggctgacattagaagtctgcagacagtttcaaagaggaacatgctcacgctctgatgaagaatgcaaatttgctcatccccccaaaagttgtcaggttgaaaatggaagagtaattgcctgctttgattccctaaagggccgttgttcgagagagaactgcaagtatcttcaccctccgacacacttaaaaactcaactagaaattaatggaaggaacaatttgattcagcaaaaaactgcagcagcaatgcttgcccagcagatgcaatttatgtttccaggaacaccacttcatccagtgcccactttccctgtaggtcccgcgatagggacaaatacggctattagctttgctccttacctagcacctgtaacccctggagttgggttggtcccaacggaaattctgcccaccacgcctgttattgttcccggaagtccaccggtcactgtcccgggctcaactgcaactcagaaacttctcaggactgacaaactggaggtatgcagggagttccagcgaggaaactgtgcccggggagagaccgactgccgctttgcacaccccgcagacagcaccatgatcgacacaagtgacaacaccgtaaccgtttgtatggattacataaaggggcgttgcatgagggagaaatgcaaatattttcaccctcctgcacacttgcaggccaaaatcaaagctgcgcagccgcggccgcggccacagtcatgactcagtcgactgccaaagcaatgaagcgacctctcgaagcaactgtagacctggcctttccccctggtgctcttcatcctttaccaaagagacaagcacttgaaaaaagcaatggtaccagcgcggtctttaaccccagcgtcttgcactaccagcaggctctcaccagcgcacagttgcagcaacacgccgcgttcattccaacagggtcagttttgtgcatgacacccgctaccagtattgtacccatgatgcacagcgctacgtccgccactgtctctgcagcaacaactcctgcaacaagtgtccccttcgcagcaacagccacagccaatcagataattctgaaataatcagcagaaacggaatggaatgccaagaatctgcattgagaataactaaacattgttactgtacatactatcctgtttcctcctcaatagaattgccacaaactgcatgctaaataaagatgtagttcttctggacagaccacaactctaagaagctagtgctgctatctcatatatgagtattaaatatggtatgcttagtatattccaacctaagatagttaactacctgagaccagctgtgatgtttaaagacataaaggataaagtttacttttaaagggtttctaaacatagtttctgtcctaggaatattgtcttatctccataactatatagctgatgcagaaagtccagccagtttactcatttcgattcagaatatttcaaatttagcaataaacaattagcattagttaaaaaagaaacatattccaagggcaggttcgattctagctctaattactgtcatgtcatttacccactggatcaaagggtatgtttcacttcttgacaatataaatgctgcagcaaagatgagaggtgaagtaaaaccgatacctgtcctgcaggtctaaaatttgaatggaaattcaagcacaagtactggggacacatcaaagtgtggtgtttggtttgcctggagatgccacgttgaatcatgtgattctagagtcgacctgcaggcatgc

SEQ ID NO: 157 - DNA, 6356 bp, Homo sapiens
gccttcgccgccgttggggctggaagttcccgccaggtccgtgccgggcgagagagatgctgcccggcccgcctcggctttgaggcgagagaagtgtcccagacccatttcgccttgctgacggcgtcgagccctggccagacatgtccacagggttctccttcgggtccgggactctgggctccaccaccgtggccgccggcgggaccagcacaggcggcgttttctccttcggaacgggagcgtctagcaacccttctgtggggctcaattttggaaatcttggaagtacttcaactccagcaactacatctgctccttcaagtggttttggaaccgggctctttggatctaaacctgccactgggttcactctaggaggaacaaatacaggaatagcaacaactataactacaggattaactctgggaacgccagccactacatctgcagctacaacaggcttcagtttaggattcaataaacctgcagcatctgccacaccatttgctctacctattacctctacctcagctagcggtctgactctttcgtctgctctgacatcaactccagcagcatccacaggatttactctaaataatttgggtgggacaacagccacaactacaactgcatcaacaggcctctctttagggggagccttagctggtttgggaggttcacttttccagagtacaaacacaggaacatcaggacttggacagaatgctttagggttgactttgggaactacagcagctacttcaactgcaggcaatgaaggccttggtggtatagatttcagtagctcctcagataaaaagagtgataaaacgggaacaagaccagaggatagtaaagctctgaaggatgaaaatctacctcctgtcatctgccaggatgttgaaaatctccagaaatttgtgaaggagcagaaacaagttcaagaagaaattagtagaatgtcttcaaaagcaatgcttaaggtacaagaagatattaaagctctgaagcagctcctgtcgttggctgccaatggaatacagagaaacactctcaacattgacaaattgaaaatagaaactgctcaggagttgaagaatgctgaaatagctttaagaacccagaagacaccacctggacttcaacatgaatatgcagctcctgctgactacttcagaatcttggttcagcaatttgaggtacagcttcagcagtacaggcagcagattgaagaactagaaaaccatcttgccactcaagcaaataattcacatataacccctcaagatttgtcaatggctatgcagaaaatttatcaaacatttgtagctttagcggcacaacttcagtctattcatgaaaatgtaaaggttctgaaagaacagtaccttggctacaggaaaatgttcttgggagatgctgttgatgtgtttgaaacaaggcgagcagaagccaagaagtggcagaacacacccagagttactactggacccactcctttcagcaccatgccaaacgcagcagccgttgccatggctgcaacacttacacagcagcaacagcctgctacaggtctgaacgcattcaagttatagcttcttactgttccaatgcagaacatttatgtgcgtttttataagtcttccatttgtgtgagcactgaagaaatttctatgagtagctgttccaatacaatctaaaattgtgatggacacgattataaacatacctgataaaaaaggcagggtagtcttagcaataattatacatcaattagatattgaatattgtgaatctacttaatgttatttgctgtaatgctataaatgccctttagaacatggtgtttcactagtgaattacatttaagaataacattagattctgaaatcatgactgtaccatttattgttttaaagtcagagatcatccatccattctttgaatttttcatatatgatactgataggtggtgcattctcattttcctcatacatagtgattacaaagtacccacattcaggatgaagtatgcttttattgactgaaggtatgttgaagatcaataggcttgtttgtatgtatgttgactgtaaacagaatacaagccctctaaaccaaattttgaagatgatacatgctagaattgtacctttccaaggtgaacagaacagcaagagcaggaaaaagatgttttgagatgtggattgcacattaaggagcaactgggaagttgaacagatgaaaataattggtgacatggaaagcagattgttttatttcttggtttagttacacttctaattagagaaacattttttgtggtcattctacagtgttttatttggtcctgtgtctttcggaggttaatagttatcttaatcctgccatcccttttgtcaggtttgaagcttgacatggaaaaatagtcttaatcgatattgatttttttattttaatcattcataaatttcttagtaatgcttactattcaatagcatgtgtctttctgagagttccatatagtccagtagtacattataatacacacaaattaatacatatttagattgcattcaagctacctatactagggaagcattctctggttttcactattggcagtttaaaaaattgttcttcacatttggagatgacagaattgacttgccataagtaaagggttgatgatagatttatgccaaatcctccatatcccgtggctggacccatgtgaatagtggctcgcacgagcactgtctggtagctctctagctggctggagtgtaggattgcgttgttaagttatggagggaaaaagtcattatgggattgattcctttgaggattgatatttcttcttaaaaggattcaatcccataattatgaccatcagctctcatgattacctaaccagttaatcaaaccaaccatagtactagtttactttttagagccagtattaatcctaaagtagataagtgtagatttggttaagtgttctttaaacatagtgaatttccattctattaaatagaacttgagaaatgtcagttatataaaaagttatgttgtaagtgaatatattctatgataaatacctaaacttgaagcaaaatctcctgtcaagggtttgtgtgtgtgtgtgtgtttaactttcttatctatagattattattttgagaaattcataggttttcacttatacattttgagcttgtggacatatggagatgtgtgttcattctctaaatgagtgcctactatgtgctgggctcgaggaatacaaaggtagacaatatagattttgtctttgccctctgtggtggttgacaatgttagcttaatctggagtattcttgaggagccttttgctcataggctttaattttgtctgtgacttttgccaggctttggggaaattgactgccttcactcttccctgaaactttgaagtccacataagggctttctcatcagatggcagaaattataatttattaacctaaacaaccttacagtgttttcgctttgaattgtatgaattcttagaactgagaagctaaacaacagtgataacaattttacattatcttttctttctccttttgtttctctaaaggtctcccaggccttcccagtcaaaattttcgttatttttagtcatgtcaccatgatgtgagatttctgagctctgttagatacatttagaaatgtccctatttatcaaatggtgttttgtaccccataagttatcccttatgccctgtgacttctgtgaaatctttgtttttaagtgccagtaacaaattttagaccatctagatgagggtagagagagcttatgcattgtttttatacatcactgttgatctatacaagatttgagttatcagaagggttttgcttttatttgcatatgaaatttttattaacatgaatatgggcacagagcaaatagcttcttagactgctgccttctgaaggtggcttctgtatctttctcagaggaggaggaatagacttaaacgacttctttgtcctccttcaattttttttttaatgaaaaagtatactagggcttaggcatgtgtgatttacagttatttgttctgaaggctgcagagaattgaaaatccagcaggctatttgtgtatgaaatcatgagcatcgataacgtggataacgtagttccatgttggcagaacttgacacttgtctataagtgcttcccaagcctcctgaaaaactgaagacatttacattaggcttttcagtataattttaatttaggataggttttttagcaatgtatctgggattgagttttgctattgtgttttgacactttaagagttcttgatgtttacataataagactttcttatgtgacttagctgctgttttaaggagagccaagacgttttgttaggaattcctaatttttagcttagtgtaggtttggacatttaaggtgtagtgttaaataggaaacattaagtatttcatcttagtttcttgtggttttgtgattttgttgtatttaataaccaaaggaacattccccattaaatcagtaagagtaaaatttttcaaactggggaaaacgcattttaggttttttaaagaaaaattattttaaaatgtgacttagaaataaccatactaattacattaggcatttggggtgatcatggaaaattataaaatatttttagcactttagtcctttttctgttaatgcagttttacttttaagaaagtaaaatttattctggaaaatatgaattacagcgctaaacctggttttgttgtgtgtgaatatattatatggtaacttttgtaaaatgttactctacatgaagatttcactttggccagtcattggtatatatcactacaaacttaattttatttatggaaataagaacctctcattggatgactattcaaatttcaaagcagacttcttgaattgtttacgtaacttttgcctgaaggatttagactgctttctaatagtgaaactaatatatatggtggccagagtgtaatatatgctaatactttggcatgggagatatttatcatgagtttttactattaaaaaatgttatacatttgcctacgagttttataaatgatgttgccttcagaatttgtgtgaaggtacaaaactaaaaatatcatgtatctgatgtgcaatggaaagtcttgtcatcattagatatgagttcttgattatattctgaatattgatgattagaaaaatcttatgttctgtcgctcttaacaacagacccacacacaacaaaaagcatgctatttgagtaactcttacgacttacaaggctgagggctgtggtgtgcattattctttagggtcttccaccagcagtgcctcctattaacctgtgacaaacaagtctctcaatgttaaagaactggacatgtgttttttatgttttttgttaggaatcagaaagtataataatatgcttggtttctttttcctatagtaacattttacaaaagagctgctaggcaggtattttattctcaaagtgatctcaaactggatgtaaaattttaaattatttttttaatagtagtataagaattctggctgctattagttattgtttgttttctgggttagaagctattcgaaaagtccagtttctgtcccagtgtagcaaaatgtagttcctcggttgtttttctttaaatgctttataattttacactacctttttaatatacaaacctcattcttcattggataacttgaaggctttgatttctttaaaaatttaaattttagtgtgtatattactttgacagttccctcatctttgagatgcactgatcactgtgcttgaaaaagacaatactgaagattgtactatgaagtttattgaataattttcataaattatttatccaaatgagagatttttagatttttgtattctgcttagttttaaaaaaaaaaaatagtagtttaaaagagaggctagtaagtttgatgctattcttgccaaacaaactcagccaaaatctttaaagtaacaagagggaaaaggatgactaatcgttctgcttctgagtacattttccaaaacgttggaaagaaacttctgaattgaaatcttgaatgtattgaatctgtcaaggtacacagcggtgcctttgtaaatgttcattactttatttaatcaggtgataagtggtgtaatgtagcagagcttaagaatagaactcaattatcactttttgtgaacaagttggaattgtcatgttactgtgtaattgatttgctttacaatgaacaataaatttaataaaat

SEQ ID NO: 158 - DNA, 6409 bp, Homo sapiens
caaggcggccggcggcgaccatggcagcgggccggcggcggccgtagtggcccaggcctgggcttcagcctcccggggccccagagggcggggcggtccgggccgcggcggtggcggcgccacttccctgctcccgcccgaggactcctgcgggcactcgctgaggaccagcggaccggcggcgcgaatctgactgaggggcggggacgccgtctgttccccgccgctcccggcagggccgggccgggccgggctgggccgggctgggccgggcgggcccctgggagcagcccccaggcgggggaccgccttggagacccgaagccggagctagaggcaggcggtgggcccgggtggagtcccggccggagctggtggttcgggggcggtgctaggccccgaggctgcgggacctgagcgcgaggagcctgagtgcgggtccagcggtggcggcatgagccggcccccgccgacggggaaaatgcccggcgcccccgagaccgcgccgggggacggggcaggcgcgagccgccagaggaagctggaggcgctgatccgagaccctcgctcccccatcaacgtggagagcttgctggatggcttaaattccttggtccttgatttagattttcctgctttgaggaaaaacaagaacatagataatttcttaaatagatatgagaaaattgtgaaaaaaatcagaggtctacagatgaaggcagaagactatgatgttgtaaaagttattggaagaggtgcttttggtgaagtgcagttggttcgtcacaaggcatcgcagaaggtttatgctatgaagcttcttagtaagtttgaaatgataaaaagatcagattctgcctttttttgggaagaaagagatattatggcctttgccaatagcccctgggtggttcagcttttttatgcctttcaagatgataggtatctgtacatggtaatggagtacatgcctggtggagaccttgtaaaccttatgagtaattatgatgtgcctgaaaaatgggccaaattttacactgctgaagttgttcttgctctggatgcaatacactccatgggtttaatacacagagatgtgaagcctgacaacatgctcttggataaacatggacatctaaaattagcagattttggcacgtgtatgaagatggatgaaacaggcatggtacattgtgatacagcagttggaacaccggattatatatcacctgaggttctgaaatcacaagggggtgatggtttctatgggcgagaatgtgattggtggtctgtaggtgttttcctttatgagatgctagtgggggatactccattttatgcggattcacttgtaggaacatatagcaaaattatggatcataagaattcactgtgtttccctgaagatgcagaaatttccaaacatgcaaagaatctcatctgtgctttcttaacagatagggaggtacgacttgggagaaatggggtggaagaaatcagacagcatcctttctttaagaatgatcagtggcattgggataacataagagaaacggcagctcctgtagtacctgaactcagcagtgacatagacagcagcaatttcgatgacattgaagatgacaaaggagatgtagaaaccttcccaattcctaaagcttttgttggaaatcagctgcctttcatcggatttacctactatagagaaaatttattattaagtgactctccatcttgtagagaaaatgattccatacaatcaaggaaaaatgaagaaagtcaagagattcagaaaaaactgtatacattagaagaacatcttagcaatgagatgcaagccaaagaggaactggaacagaagtgcaaatctgttaatactcgcctagaaaaaacagcaaaggagctagaagaggagattaccttacggaaaagtgtggaatcagcattaagacagttagaaagagaaaaggcgcttcttcagcacaaaaatgcagaatatcagaggaaagctgatcatgaagcagacaaaaaacgaaatttggaaaatgatgttaacagcttaaaagatcaacttgaagatttgaaaaaaagaaatcaaaactctcaaatatccactgagaaagtgaatcaactccagagacaactggatgaaaccaatgctttactgcgaacagagtctgatactgcagcccggttaaggaaaacccaggcagaaagttcaaaacagattcagcagctggaatctaacaatagagatctacaagataaaaactgcctgctggagactgccaagttaaaacttgaaaaggaatttatcaatcttcagtcagctctagaatctgaaaggagggatcgaacccatggatcagagataattaatgatttacaaggtagaatatgtggcctagaagaagatttaaagaacggcaaaatcttactagcgaaagtagaactggagaagagacaacttcaggagagatttactgatttggaaaaggaaaaaagcaacatggaaatagatatgacataccaactaaaagttatacagcagagcctagaacaagaagaagctgaacataaggccacaaaggcacgactagcagataaaaataagatctatgagtccatcgaagaagccaaatcagaagccatgaaagaaatggagaagaagctcttggaggaaagaactttaaaacagaaagtggagaacctattgctagaagctgagaaaagatgttctctattagactgtgacctcaaacagtcacagcagaaaataaatgagctccttaaacagaaagatgtgctaaatgaggatgttagaaacctgacattaaaaatagagcaagaaactcagaagcgctgccttacacaaaatgacctgaagatgcaaacacaacaggttaacacactaaaaatgtcagaaaagcagttaaagcaagaaaataaccatctcatggaaatgaaaatgaacttggaaaaacaaaatgctgaacttcgaaaagaacgtcaggatgcagatgggcaaatgaaagagctccaggatcagctcgaagcagaacagtatttctcaaccctttataaaacacaagttagggagcttaaagaagaatgtgaagaaaagaccaaacttggtaaagaattgcagcagaagaaacaggaattacaggatgaacgggactctttggctgcccaactggagatcaccttgaccaaagcagattctgagcaactggctcgttcaattgctgaagaacaatattctgatttggaaaaagagaagatcatgaaagagctggagatcaaagagatgatggctagacacaaacaggaacttacggaaaaagatgctacaattgcttctcttgaggaaactaataggacactaactagtgatgttgccaatcttgcaaatgagaaagaagaattaaataacaaattgaaagatgttcaagagcaactgtcaagattgaaagatgaagaaataagcgcagcagctattaaagcacagtttgagaagcagctattaacagaaagaacactcaaaactcaagctgtgaataagttggctgagatcatgaatcgaaaagaacctgtcaagcgtggtaatgacacagatgtgcggagaaaagagaaggagaatagaaagctacatatggagcttaaatctgaacgtgagaaattgacccagcagatgatcaagtatcagaaagaactgaatgaaatgcaggcacaaatagctgaagagagccagattcgaattgaactgcagatgacattggacagtaaagacagtgacattgagcagctgcggtcacaactccaagccttgcatattggtctggatagttccagtataggcagtggaccaggggatgctgaggcagatgatgggtttccagaatcaagattagaaggatggctttcattgcctgtacgaaacaacactaagaaatttggatgggttaaaaagtatgtgattgtaagcagtaagaagattcttttctatgacagtgaacaagataaagaacaatccaatccttacatggttttagatatagacaagttatttcatgtccgaccagttacacagacagatgtgtatagagcagatgctaaagaaattccaaggatattccagattctgtatgccaatgaaggagaaagtaagaaggaacaagaatttccagtggagccagttggagaaaaatctaattatatttgccacaagggacatgagtttattcctactctttatcatttcccaaccaactgtgaggcttgtatgaagcccctgtggcacatgtttaagcctcctcctgctttggagtgccgccgttgccacattaagtgtcataaagatcatatggacaaaaaggaggagattatagcaccttgcaaagtatattatgatatttcaacggcaaagaatctgttattactagcaaattctacagaagagcagcagaagtgggttagtcggttggtgaaaaagatacctaaaaagcccccagctccagacccttttgcccgatcatctcctagaacttcaatgaagatacagcaaaaccagtctattagacggccaagtcgacagcttgccccaaacaaacctagctaactgccttctatgaaagcagtcattattcaaggtgatcgtattcttccagtgaaaacaagactgaaatatgatggcccaaaatttattaaaaagctatattttcctgagagactgatacatacactcatacatatatgtgttccccttttccctgtaatataaattacaaatctgggctcctttgaagcaacaggttgaaccaacaatgattggttgatagactaaggatatatgcaactcttccagacttttccataaagctctctcggcagtcgctcacactacagtgcacacaaggattgagaagagttaaaggctaaagaaaacatcttttctagcttcaacagagaggtttcaccagcacatttaccagaagaatctgggaatggattccactacagtgatattgactgcatctttaagaagtgaccattatactgtgtatatatatataaacacacacacatatatatatatatatagtactctaatactgcaagaaggttttttaaacttcccactttattttttatacacattaatcagatatcattacttgctgcagttgcaactatgcacttgtataaagccataatgttggagtttatatcactcattcctgtgtacctgatggaagttgcatgttcatgtttaagcagttactgtaacaagaagtttaaagttaattatatcagtttcctaatgcttcatgataggcaactttacccattttgaatgccttaatttaatttttttcaaagtctcagccctgtctgtattaaaaaacaaaaaaagcgtttaccagctcttaggatgtaaactagctttgtggaagataaatcgtgcactatttttacacataaatagttatatcaatgtcagcctattttgattaacaaatgtttttaaagtattattggttatagaaacaataatggatggtgttggaactaatatatccttgatgtctgtctattattcattcaactctttttacagacctcagtattagtctgtgactacaaaatattttatttgctttaaatttgctggctaccctagatgtgtttttattcctggtaaagacatttgtgattacattttcacacttaagattcaaaatttttcccaaatataaagaaaactaagacagactgtagatgcattttaaatatttaaatatgatcctcagacatgcagctgtgtgtggcagtattttagtaccgggttaagaaaactggcaactgggaagaagtggcctcaaaggcacttaatttgatttttattttttaaatgctgtcaaagttacagtttacgcaggacattcttgccgtattctcatgatcccagataagtgtgtgttttatactgcaacaatatgcagcaatggtaagcgtaaagtttttttttgtttttgtttttgtttttttttatattatgaagtcttttaacagtctctctttatataaatacacagagtttggtatgatatttaaatacatcatctggccaggcatggtggcttacgcctgtaatcctagcactttgggaggccaagacgggcggatcacctgaggtgaggagttcaagaccagcctgcccaacatagtgaaactccgtctctaccaatatacaaaaattagccgggcatgatggtggtggcctgtaatcccagctacttgggaggctgagacaggagaatcgcttgaacccaggagacggtggttgcagtgagcgaagatcgagccactgcactccagcctgggcagctgaacaagactccgtctc

SEQ ID NO: 159 - DNA, 5727 bp, Homo sapiens
cgcccttagccgatcggggcgctcagcccacacgcaccgctgctcggggcttggagatccgcgcaggctgggctcccggacgcggcggaccgacgcgcggaggatcgggatccggcgctgtggggctggggtgggcgggggaggctgggcccggggcctctggcgcgacacccgcatgaggacgcgagtgaaatagaccaaggtggaatttccaagggaaaagcttcggggtggttttggtccatttctccagcgaagaagtagacatggcgagcgactccccggctcgaagcctggatgaaatagatctctcggctctgagggaccctgcagggatctttgaattggtggaacttgttggaaatggaacatacgggcaagtttataagggtcgtcatgtcaaaacgggccagcttgcagccatcaaggttatggatgtcacaggggatgaagaggaagaaatcaaacaagaaattaacatgttgaagaaatattctcatcaccggaatattgctacatactatggtgcttttatcaaaaagaacccaccaggcatggatgaccaactttggttggtgatggagttttgtggtgctggctctgtcaccgacctgatcaagaacacaaaaggtaacacgttgaaagaggagtggattgcatacatctgcagggaaatcttacgggggctgagtcacctgcaccagcataaagtgattcatcgagatattaaagggcaaaatgtcttgctgactgaaaatgcagaagttaaactagtggactttggagtcagtgctcagcttgatcgaacagtgggcaggaggaatactttcattggaactccctactggatggcaccagaagttattgcctgtgatgaaaacccagatgccacatatgatttcaagagtgacttgtggtctttgggtatcaccgccattgaaatggcagaaggtgctccccctctctgtgacatgcaccccatgagagctctcttcctcatcccccggaatccagcgcctcggctgaagtctaagaagtggtcaaaaaaattccagtcatttattgagagctgcttggtaaagaatcacagccagcgaccagcaacagaacaattgatgaagcatccatttatacgagaccaacctaatgagcgacaggtccgcattcaactcaaggaccatattgatagaacaaagaagaagcgaggagaaaaagatgagacagagtatgagtacagtggaagtgaggaagaagaggaggagaatgactcaggagagcccagctccatcctgaatctgccaggggagtcgacgctgcggagggactttctgaggctgcagctggccaacaaggagcgttctgaggccctacggaggcagcagctggagcagcagcagcgggagaatgaggagcacaagcggcagctgctggccgagcgtcagaagcgcatcgaggagcagaaagagcagaggcggcggctggaggagcaacaaaggcgagagaaggagctgcggaagcagcaggagagggagcagcgccggcactatgaggagcagatgcgccgggaggaggagaggaggcgtgcggagcatgaacaggaatacatcaggcgacagttagaggaggagcagagacagttagagatcttgcagcagcagctactgcatgaacaagctctacttctggaatataagcgcaaacaattggaagaacagagacaagcagaaagactgcagaggcagctaaagcaagaaagagactacttagtttcccttcagcatcagcggcaggagcagaggcctgtggagaagaagccactgtaccattacaaagaaggaatgagtcctagtgagaagccagcatgggccaaggaggtagaagaacggtcaaggctcaaccggcaaagttcccctgccatgcctcacaaggttgccaacaggatatctgaccccaacctgcccccaaggtcggagtccttcagcattagtggagttcagcctgctcgaacaccccccatgctcagaccagtcgatccccagatcccacatctggtagctgtaaaatcccagggacctgccttgaccgcctcccagtcagtgcacgagcagcccacaaagggcctctctgggtttcaggaggctctgaacgtgacctcccaccgcgtggagatgccacgccagaactcagatcccacctcggaaaatcctcctctccccactcgcattgaaaagtttgaccgaagctcttggttacgacaggaagaagacattccaccaaaggtgcctcaaagaacaacttctatatccccagcattagccagaaagaattctcctgggaatggtagtgctctgggacccagactaggatctcaacccatcagagcaagcaaccctgatctccggagaactgagcccatcttggagagccccttgcagaggaccagcagtggcagttcctccagctccagcacccctagctcccagcccagctcccaaggaggctcccagcctggatcacaagcaggatccagtgaacgcaccagagttcgagccaacagtaagtcagaaggatcacctgtgcttccccatgagcctgccaaggtgaaaccagaagaatccagggacattacccggcccagtcgaccagctagctacaaaaaagctatagatgaggatctgacggcattagccaaagaactaagagaactccggattgaagaaacaaaccgcccaatgaagaaggtgactgattactcctcctccagtgaggagtcagaaagtagcgaggaagaggaggaagatggagagagcgagacccatgatgggacagtggctgtcagcgacatacccagactgataccaacaggagctccaggcagcaacgagcagtacaatgtgggaatggtggggacgcatgggctggagacctctcatgcggacagtttcagcggcagtatttcaagagaaggaaccttgatgattagagagacgtctggagagaagaagcgatctggccacagtgacagcaatggctttgctggccacatcaacctccctgacctggtgcagcagagccattctccagctggaaccccgactgagggactggggcgcgtctcaacccattcccaggagatggactctgggactgaatatggcatggggagcagcaccaaagcctccttcaccccctttgtggaccccagagtataccagacgtctcccactgatgaagatgaagaggatgaggaatcatcagccgcagctctgtttactagcgaacttcttaggcaagaacaggccaaactcaatgaagcaagaaagatttcggtggtaaatgtaaacccaaccaacattcggcctcatagcgacacaccagaaatcagaaaatacaagaaacgattcaactcagaaatactttgtgcagctctgtggggtgtaaaccttctggtggggactgaaaatggcctgatgcttttggaccgaagtgggcaaggcaaagtctataatctgatcaaccggaggcgatttcagcagatggatgtgctagagggactgaatgtccttgtgacaatttcaggaaagaagaataagctacgagtttactatctttcatggttaagaaacagaatactacataatgacccagaagtagaaaagaaacaaggctggatcactgttggggacttggaaggctgtatacattataaagttgttaaatatgaaaggatcaaatttttggtgattgccttaaagaatgctgtggaaatatatgcttgggctcctaaaccgtatcataaattcatggcatttaagtcttttgcagatctccagcacaagcctctgctagttgatctcacggtagaagaaggtcaaagattaaaggttatttttggttcacacactggtttccatgtaattgatgttgattcaggaaactcttatgatatctacataccatctcatattcagggcaatatcactcctcatgctattgtcatcttgcctaaaacagatggaatggaaatgcttgtttgctatgaggatgagggggtgtatgtaaacacctatggccggataactaaggatgtggtgctccaatggggagaaatgcccacgtctgtggcctacattcattccaatcagataatgggctggggcgagaaagctattgagatccggtcagtggaaacaggacatttggatggagtatttatgcataagcgagctcaaaggttaaagtttctatgtgaaagaaatgataaggtattttttgcatccgtgcgatctggaggaagtagccaagtgtttttcatgaccctcaacagaaattccatgatgaactggtaacagaagagcacttggcacttatcttcatggcgttatttctaatttaaaagaacataactcatgtggacttatgccagtctagaggcagaatcagaaggcttggttgaacatatcgctttccctttttcctctccctccgcccctcccagtacagtccatctttcaatgttgcagcctggttgagaaggagagaaaaaggtggcaggaatttccaggagatccccaagaatgctgccttgtctgtggacaaagatggaccatgtgcccttcggaattagggatagaaacaaatattgtgtgctcttaacgattaagctgtgttatggtgggttttcaggtttttaccttttttctttacccctttactctgcaagaatggggaaagaatgcatactgcgaaaatgagtcttttaaattctgtctgcctactagttttaagtatatggtatgttgtaaaatttccaatgatgagagacagcacaataaatgtaccttatctccttaggctgaaggccataactacatagtggagtaatttaagaactctcttgccttcaccaacccaaaaggttgctttttgatagcaactggctaatgaatttttaaaaagagaagaaaaatactagttttcccctcttttgggaaatagattttaaatggctaaactactagccttaaaactactagtctaataaaatcaactaccacttttgtgaatctgacaggccacatttttatatggccctttacagaatggagtgtgttgaacaggatactaacgccattgagttgagctggcctagcgatggagggacactctaacacaactttccctcagctattatgcaacagatcagggaaaaagatgggatgacagatggggtcagacagaaagagcttctgggaaacaagcttacatagtcttttttaaaatgcacaaagcctcccagctaagaggtcacttggtttgggcttcattaggactgagactttgttgagttctttctgggacttggagagtggatgatattcaggctctgaacattcccagcgctctcccgagggtgccactttctcaagatgaaaactgtgactgaaaaaattaataataaatgtttctgagctgcctgtgttctccctgtgtgggtgagagaagggactagactcctaagcctgcctcagatacaagaggcatcattggctccaattttagagaacttgaaagcaaggctttggacaaaattttgagaccctaatcactttaccttcctccaaattacccaacatacggtaaacaacatttgtgcagaagtatgtatgtatttagttcaggttgacttgtgtccttataaactcttactcaaatgatttgaacttt

SEQ ID NO: 160 - DNA, 2481 bp, Homo sapiens
gcccctcgccggtacctcagcaaggtgcgttgccgccaggtgccactagaagcgccaggctggggccgcctctgagcgccccgcgggggccatggatggtgaaacagcagaggagcaggggggccctgtgcccccgccagttgcacccggcggacccggcttgggcggtgctccgggggggcggcgggagcccaagaagtacgcagtgaccgacgactaccagttgtccaagcaggtgctgggcctgggtgtgaacggcaaagtgctggagtgcttccatcggcgcactggacagaagtgtgccctgaagctcctgtatgacagccccaaggcccggcaggaggtagaccatcactggcaggcttctggcggcccccatattgtctgcatcctggatgtgtatgagaacatgcaccatggcaagcgctgtctcctcatcatcatggaatgcatggaaggtggtgagttgttcagcaggattcaggagcgtggcgaccaggctttcactgagagagaagctgcagagataatgcgggatattggcactgccatccagtttctgcacagccataacattgcccaccgagatgtcaagcctgaaaacctactctacacatctaaggagaaagacgcagtgcttaagctcaccgattttggctttgctaaggagaccacccaaaatgccctgcagacaccctgctatactccctattatgtggcccctgaggtcctgggtccagagaagtatgacaagtcatgtgacatgtggtccctgggtgtcatcatgtacatcctcctttgtggcttcccacccttctactccaacacgggccaggccatctccccggggatgaagaggaggattcgcctgggccagtacggcttccccaatcctgagtggtcagaagtctctgaggatgccaagcagctgatccgcctcctgttgaagacagaccccacagagaggctgaccatcactcagttcatgaaccacccctggatcaaccaatcgatggtagtgccacagaccccactccacacggcccgagtgctgcaggaggacaaagaccactgggacgaagtcaaggaggagatgaccagtgccttggccactatgcgggtagactacgaccaggtgaagatcaaggacctgaagacctctaacaaccggctcctcaacaagaggagaaaaaagcaggcaggcagctcctctgcctcacagggctgcaacaaccagtagctcatggggccttggaggagcctggcctctcagcctgcataacagactgaaatgtgctcaggccctggccaggagggcccagggtcattcttttaacaaaggattattttgttgtgttttaatttgtcactcggaacttcaggatggaggaccctgaccctaagcctccttcagatctctggcccaggctcaagccctagagatgggcagggcctaggggctgggagctgcctgctgccatagcagcacctttagctaggttggcccgagtgaggcctctgtgctgtcctgccctggtgcatggccttagctttctaggccactgggagttgtggctgggcttcccatcttccacagagacatctccctgtgggatgggcagatgggcctggccttgagaaaggcattggccattggttgccatggtgaccagggaccacgttgctgcctgtgaatgctgagtgagcgagtaagggaggaggggcgattgagggttcacctctgccttggggaggctgatttctcacacactggctggccctctcattctcactcctccttgggccctgaggctgctggatccagtctgcctgcctccctgtgcagtccagccctgccttgctgcagccccagcccagatggcactcagcgctctcccctgagggagtccctgggcctagccatcccctcactattcccgacccaaagggtgacttttcatctgaacttaaagtgggagatatttttaacttttttccactttggaaaatgtcactgtgacaaaagccagcatactttccctgcacccatctgctcaccagatctcaggcaggaaagcccctctctgttgaagtcaggggctatcttttggtatacttgtgtgaaagtggctggttgggagcagagctaagtggcttcccattaacctgaggtctctttctttactctgggtcagacctgaggttggggaaggcgactgagccatgctcagaatgtctggtcctggcttgggcctgagtagggcagagagggcctttcatggctgatcagagcttaccagccccaccccaccatggtagccttagggtgctgagtgcctgatactgcctgacaagtgcctgacacgcagcctagttccttcctggcccctctctcactggctgggaaaccctagaccatgtcagataggacaacactgctgggttttacatccagatagtaataaacaccatttcatcatt

SEQ ID NO: 161 - DNA, 1822 bp, Homo sapiens
gaattccggggtctggatcaatatataataaaacgctttgatggaaagaaaatttcccaggaacgagaaaaatttgctgatgaaggcagtatattttacacccttggagaatgtgggctcatatccttttcagactacattttcctcacaactgttctttccactcctcagagaaattttgaaattgccttcaagatgtttgatttgaatggagatggagaagtagatatggaagaatttgaacaggttcagagcatcattcgctcccaaaccagtatgggtatgcgccacagagatcgtccaactactggcaacaccctcaagtctggcttgtgttcagccctcacaacctacttttttggagctgatctgaagggaaagctgacaatcaaaaacttcctcgaatttcagcgtaaactgcagcatgatgttctgaagcttgagtttgaacgccatgaccctgtggatgggagaattactgagaggcagtttggtggcatgctacttgcctacagtggggtgcagtccaagaagctgaccgccatgcagaggcagctcaagaagcacttcaaagaaggaaagggtctgacatttcaggaggtggagaacttctttactttcctaaagaacattaatgatgtggacactgcattgagtttttaccatatggctggagcatctcttgataaagtgaccatgcagcaggtggccaggacagtggctaaagtggagctctcagaccacgtgtgtgatgtggtgtttgcactctttgactgtgatggcaatggcgaactgagcaataaggaatttgtttccatcatgaagcaacggctgatgagaggcctggaaaagcccaaagacatgggtttcactcgcctcatgcaggccatgtggaaatgtgcacaggaaactgcctgggacttcgctttacccaaacagtaaccccacactgcaagaggggacccctccacccccagtaccctggaccccctccgcagagtctcggcagagccctttgtgctgctgcttctggaagtagtcccccttcctcccgggatgacctcaggactctgtcggtttcccctctttacccttccccgtccccgtgttctgctgggctctgattctgcccaatgagtatccccataggttctcaaaaacatgaacaagtcgtgtaaagctcagacatttgtcagcctcaacagcaccacccattcaagcatcctgtggataaagaattcagggaaccatccacacacctgccaaccctgggaagcatccagttctcaaatcgtttttgctatggatttatactaacaagaacattccttgacttccctcctgctggtgttttaaagccacaagtagggaagatatctggcaggcagaaagaagtctgtgatgataaacaatgatgaggatgacctaggcaccctacgctagtgtgagaagcctgcgccccaggaaggatctgtgttagtccctgggatggctccaaggcctgctctaggaaggcagcatgctcagtgggaacacagcaagattcagaatttaaagtagttgcttcatggctctgtgcactcccttttcttcctcgcagcctccctaagatgactccagtgtgaccctgtgcttagtgagcaatagtgattgagctcatgttccctgcaatgtgccatttcctctccaggatgggcctctaaagctgaggcctggctcagagcctgtttgccctctgtcttaaacaattgtaaatatcacttaaattataaccatttgcaataaacatccccaaagttaaaaaaaaaaaaaaaacgaattc

SEQ ID NO: 162 - DNA, 2513 bp, Homo sapiens
gtcactcagcctatggagatgaagaaactgaggttcagagaggttaagagactccactgaggtcacacagccgatgacagacaaccttctgtgccttcatcaagctggttgtgtacccaccatgtccctggcgacaggattgggaaagaaaaagccctaattaaggatcgtcagaaaccacagttggaggaggacggcagagacagtttccctccccgctataccaacacccttccttcgaggtcctcgctcctgagggaccctggactgtcacagagattaatgaccccttattttctttggatgtgaaaggaaatcactggttaaagcttgatcgagagacattatcagctctttaaggattgcaggagaataggctactttattttctgaaaaggtaaatatatgcaagcaaagccaacatgccacgaatggcgttggtctaccacacagccgtgtctgggacacagttgggggtcatcccccagcaggagtgaagtcgagcttagcggcccttgtgtcctcccttggaattcctgccatcccttttgattgagcctccacctctgggatttttcttccatttttctcctctcttaggagggagttcctgctacccatcgtgggaggccaccatcaggactgcgaagatggtgaccctgcggaagaggaccctgaaagtgctcaccttcctcgtgctcttcatcttcctcacctccttcttcctgaactactcccacaccatggtggccaccacctggttccccaagcagatggtcctggagctctccgagaacctgaagagactgatcaagcacaggccttgcacctgcacccactgcatcgggcagcgcaagctctcggcctggttcgatgagaggttcaaccagaccatgcagccgctgctgactgcccagaacgcgctcttggaggacgacacctaccgatggtggctgaggctccagcgggagaagaagcccaataacttgaatgacaccatcaaggagctgttcagagtggtgcctgggaatgtggaccctatgctggagaagaggtcggtgggctgccggcgctgcgctgtggtgggcaactcgggcaacctgagggagtcttcttatgggcctgagatagacagtcacgactttgtcctcaggatgaacaaggcgcccacggcagggtttgaagctgatgttgggaccaagaccacccaccatctggtgtaccctgagagcttccgggagctgggagataatgtcagcatgatcctggtgcccttcaagaccatcgacttggagtgggtggtgagcgccatcaccacgggcaccatttcccacacctacatcccggttcctgcaaagatcagagtgaaacaggataagatcctgatctaccacccagccttcatcaagtatgtctttgacaactggctgcaagggcacgggcgatacccatctaccggcatcctctcggtcatcttctcaatgcatgtctgcgatgaggtggacttgtacggcttcggggcagacagcaaagggaactggcaccactactgggagaacaacccatccgcgggggcttttcgcaagacgggggtgcacgatgcagactttgagtctaacgtgacggccaccttggcctccatcaataaaatccggatcttcaaggggagatgacgcagtgaagggctgaggatggacgcactgtcacacctctgcatttccagccccagcatcttgctggagccgttccatcccggagcttggaggggcagcctcaggtgtgtgcctgggcaccgctcacagcctcttgcacccagccgttgacagcatctactcagcaaggtcactaagctctgccagcgtggcagagcatgtcttggaacctgtcttgagtgggacaacgtccccccactgctgccctagagctggggagacgctcagggaaaggttcaacctccacacactaaaatcatttgctcctgggcaagcttgggaatgaatgtggaagatcctatattctgagagacaggacagtttcccaggaagatgggcagagacttgagtggcgattacctccagcacagagacgtgccaggcggtgttggcgctcggggcgagatgctgcccttcttttgcacgaagcctggcctcttgcttggcgtgataaccctgtcatcttcccaaagctcatttatgagccaccagaggctcctaccccaaagatttcacagaaacttgaggccaggtgccgtggctcacacctgtaatctgaacactttgggaggccgaggcgggaggatcacttgagcccaggagttcaagaccagcctgggcaacatagtgagactcctgtctctacaaaaataaaagatttaaaaaaattagccaggcacggtggcacacacttgtagccccagctactagggaggctgaggagggaggatctcttgtgcctaggagttcgaggctgcagtgggctgtgatcacaccactgcactccagcctgggaacaag

SEQ ID NO: 163 - DNA, 1821 bp, Homo sapiens
aaaaatacaaaaattagccggcatggtggcgcacgcctgtagtctcagctagtcaggaggctaaggcaggagaatcacttgaacctcggaggcggaggttgcagtgagtcgcaaacgcaccactgcactccagcctgggtgaaagagcgagactctgtctcaaaacaaaacaaaacaaaaaacctaacaaaaacaatagctaccatttactagacactcactacataccaggcactgtgccaaacagctccttcttatcagctcagggtgctgggggtgccagggagggaaggtcagtgaaactgtggcaggtgtcggttaagcaaaagaaggctggcatctgtgcagctgggggcaggccttccctcctccaacccccttggccaggagcatcacagggcaggcctgagcttccacaaggtgacccagccagtcaccatgaggcaggccccaggcgccaggccactctgcagaggagccacgcaggaggtgacctttcctatcttgactgaaacgggcacctggcgtggaggccaagtctggagccagccccctaggagagctccaggaggcagacatgcctgcggggtcaaagcctgccagctgactgctgtgccctcctcaggaccctgctccagcagctgcagaaactccagactctggtcaccaacaagatctccagaccttacaagatggccgccacccagactgggacctgcctcatggtggcagccttgtgctttgttctggtgctgggctccctcgtgccctgccttcccgagttctcctccggctcccagactgtgaaggaagaccccctggccgcagacggcgtctacacggccagccagatgccctcccgaagcctcctattctacgatgacggggcaggcttatgggaagatggccgcagcaccctgctgcccatggagcccccagatggctgggaaatcaaccccggggggccggcagagcagcggccccgggaccacctgcagcatgatcacctggacagcacccacgagaccaccaagtacctgagtgaggcctggcctaaagacggtggaaacggcaccagccccgacttctcccactccaaggagtggttccacgacagggatctgggccccaacaccaccatcaaactctcctaggccatgccaagacccaggacataggacggacccctggtacccagaagaggagttcttgctcactaacccggatccgcctcgtgcccctgcctcctggagcttcccattccaggagaaaaggctccacttcccagcccttccttgcccctgacatttggactcttcccttgggccgaccactctgttctcattctccttcccaccaacatccatccgtccttctcagacaaaccactcactgggtaccccacctcctctctcatatgcccaacacgaccactgcctccctgcccccacacctgcacccaaacagacacatcaacgcaccccactcacagacaccccttaccccacccccactgtacagagaccaagaacagaaattgtttgtaaataatgaaccttattttttattattgccaatcccctaagatattgtattttacaaatctccctcttcccttcgcccctcccttgttttatattttatgaagttagtgcgggctttgctgctccctggcccaggaaagagggactacctgaccctcacctggcacccccctgctgctgcccaagccgctgggcctttttaattgccaaactgctctcttcatcagctcagcacatgctttaagaaagcaaaaccaaaaaaaaaaaaaaaaaaaaa

SEQ ID NO: 164 - DNA, 1387 bp, Homo sapiens
cctcgtgccaagttccttcctgtgtatcaccccagccctgaggagagcagggaccccaccctctatgccaacaatgttcagagggtcatggcacaggctctgggcattccagccaccgaatgtgagtttgtagggagcttacctgtgattgtggtgggccggctgaaggtggcgttggaaccacagctctggggaactgggaaaagtgcttcggaaggctgggctgtccgctggctatgtggacgctggggcagagccaggccggagtcgaatgatcagccaggaagagtttgccaggcagctacagctctctgatcctcagacggtggctggtgcctttggctacttccagcaggataccaagggtttggtggacttccgagatgtggcccttgcactagcagctctggatgggggcaggagcctggaagagctaactcgtctggcctttgaggtaatggggggtggcggtggtggggggtgcttagtggctatgctcaccccgctccaggaggcctattttggtatgctgtttccagtagcttctagatactaggcatttggtatccaacctagtgccacagtgcctaaaactgcagacccccggcctctatgttgagacctagctgggcacaagaagaaggaagaagaaggaaaaagctataaagtctacagttctgcagaaagggcactggagggtcagggaaggcttgtgcaccacccttttggaagaggaggagcctgtcaggccagtctgtggggcagggtgaggccatggcatgaggagagaacttgactcttatccctttctctcccaagctctttgctgaagagcaagcagagggtcccaaccgcctgctgtacaaagacggcttcagcaccatcctgcacctgctgctgggttcaccccaccctgctgccacagctttgcatgctgagctgtgccaggcaggatccagccaaggcctctccctctgtcagttccagaacttctccctccatgacccactctatgggaaactcttcagcacctacctgcgccccccacacacctctcgaggcacctcccagacaccaaatgcctcatccccaggcaaccccactgctctggccaatgggactgtgcaagcacccaagcagaagggagactgagtgcctcagcctctcaccccctcctcctcagggcagcgctaggggcctcccctatgcctcagccccatctctgctcctgtttgaattttgttattgttgtttggttgttgtttttttaagttgattttaattttttgtttggttgatttttttgtaaaaaactattttatatataaatataaatctatatctatatctattaaaaaaaatgaagtccaaaaaaaaaaaaaaaaaa

SEQ ID NO: 165 - DNA, 4160 bp, Homo sapiens
ccaagccaagccgcgctgccaaccctcccgcccgcccgcgctcctgtccgccgtgtctagcagcggggcccagcatggtcatggcggatggcccgaggcacttgcagcgcgggccggtccgggtggggttctacgacatcgagggcacgctgggcaagggcaacttcgctgtggtgaagctggggcggcaccggatcaccaagacggaggtggcaataaaaataatcgataagtctcagctggatgcagtgaaccttgagaaaatctaccgagaagtacaaataatgaaaatgttagaccaccctcacataatcaaactttatcaggtaatggagaccaaaagtatgttgtaccttgtgacagaatatgccaaaaatggagaaatttttgactatcttgctaatcatggccggttaaatgagtctgaagccaggcgaaaattctggcaaatcctgtctgctgttgattattgtcatggtcggaagattgtgcaccgtgacctcaaagctgaaaatctcctgctggataacaacatgaatatcaaaatagcagatttcggttttggaaatttctttaaaagtggtgaactgctggcaacatggtgtggcagccccccttatgcagccccagaagtctttgaagggcagcagtatgaaggaccacagctggacatctggagtatgggagttgttctttatgtccttgtctgtggagctctgccctttgatggaccgactcttccaattttgaggcagagggttctggaaggaagattccggattccgtatttcatgtcagaagattgcgagcaccttatccgaaggatgttggtcctagacccatccaaacggctaaccatagcccaaatcaaggagcataaatggatgctcatagaagttcctgtccagagacctgttctctatccacaagagcaagaaaatgagccatccatcggggagtttaatgagcaggttctgcgactgatgcacagccttggaatagatcagcagaaaaccattgagtctttgcagaacaagagctataaccactttgctgccatttatttcttgttggtggagcgcctgaaatcacatcggagcagtttcccagtggagcagagacttgatggccgccagcgtcggcctagcaccattgctgagcaaacagttgccaaggcacagactgtggggctcccagtgaccatgcattcaccgaacatgaggctgctgcgatctgccctcctcccccaggcatccaacgtggaggccttttcatttccagcatctggctgtcaggcggaagctgcattcatggaagaagagtgtgtggacactccaaaggtcaatggctgtctgcttgaccctgtgcctcctgtcctggtgcggaagggatgccagtcactgcccagcaacatgatggagacctccattgacgaagggctggagacagaaggagaggccgaggaagaccccgctcatgcctttgaggcatttcagtccacacgcagcgggcagagacggcacactctgtcagaagtgaccaatcaactggtcgtgatgcctggggcagggaaaattttctccatgaatgacagcccctcccttgacagtgtggactctgagtatgatatggggtctgttcagagggacctgaactttctggaagacaacccttcccttaaggacatcatgttagccaatcagccttcaccccgcatgacatctcccttcataagcctgagacctaccaacccagccatgcaggctctgagctcccagaaacgagaggtccacaacaggtctccagtgagcttcagagagggccgcagagcatcagatacctccctcacccagggaattgtagcatttagacaacatcttcagaatctggctagaaccaaaggaattctagagttgaacaaagtgcagttgttgtatgaacaaataggaccggaggcagaccctaacctggcgccggcggctcctcagctccaggaccttgctagcagctgccctcaggaagaagtttctcagcagcaggaaagcgtctccactctccctgccagcgtgcatccccagctgtccccacggcagagcctggagacccagtacctgcagcacagactccagaagcccagccttctgtcaaaggcccagaacacctgtcagctttattgcaaagaaccaccgcggagccttgagcagcagctgcaggaacataggctccagcagaagcgactctttcttcagaagcagtctcaactgcaggcctattttaatcagatgcagatagcagagagctcctacccacagccaagtcagcagctgccccttccccgccaggagactccaccgccttctcagcaggccccaccgttcagcctgacccagcccctgagccccgtcctggagccttcctccgagcagatgcaatacagccctttcctcagccagtaccaagagatgcagcttcagcccctgccctccacttccggtccccgggctgctcctcctctgcccacgcagctacagcagcagcagccgccaccgccaccaccccctccaccaccacgacagccaggagctgccccagcccccttacagttctcctatcagacttgtgagctgccaagcgctgcttcccctgcgccagactatcccactccctgtcagtatcctgtggatggagcccagcagagcgacctaacggggccagactgtcccagaagcccaggactgcaagaggccccctccagctacgacccactagccctctctgagctacctggactctttgattgtgaaatgctagacgctgtggatccacaacacaacgggtatgtcctggtgaattagtctcagcacaggaattgaggtgggtcaggtgaaggaagagtgtatgttcctatttttattccagccttttaaatttaaagcttattttcttgccctctccctaacggggagaaatcgagccacccaactggaatcagagggtctggctggggtggatgttgcttcctcctggttctgccccaccacaaagttttctgtggcaagtgctggaacatagttgtaggctgaggctcctgcccttcggtcgagtggagcaagctctcgagggcagcactgacaaatgtgttcctaagaagacattcagacccaggtcttatgcaggattacatccgtttattatcaagggcaaccttggtgaaagcagaaagggtgtgtgctattgcatatatatgggggaaaaggcaatatatttttcactgaagctgagcaaccacatattgctacaaggcaaatcaagaagacatcaggaaatcagatgcacaggaaataaaggaaagctgtgctttgtcattgaatcctaagttcttagctgctgatgcaagttgtcccccaaggccatcacaaagcagtggggcatgagctgtgtttcaggggccactaaataacagctggtactgaccccagaaaccgccttcatctccattcggaagcaggtgacacaccccttcagaaggtgccctgggttgccgagtgtcagaatatactcaggactccagaggtgtcacacgtggaactgacaggagacccgccaccgtggaggcagggggcaagaaactcaagaacgcatcaagagcaccagccctgggccagggaagacaggctcttcctgcagtttctcgtggacactgctggcttgcgggcagtcggtctccagggtacctgttgtctcttttccgatgtaataactactttgaccttacactatatgttgctagtagtttattgagctttgtatatttggacagtttcatatagggcttagagattttaaggacatgataaatgaacttttctgtcccatgtgaagtggtagtgcggtgcctttcccccagatcatgctttaattctttcttttctgtagaaaccaacagtttccatttatgtcaatgctaaatccaaagtcacttcagagtttgttttccaccatgtgggaatcagcattcttaatttcgttaaagttttgacttgtaatgaaatgttcaagtattacagcaatattcaaagaaagaaccacagatgtgttaaccatttaagcagatcatctgccaaacattatattactaataaaacttaaccaacacttac

SEQ ID NO: 166 - DNA, 5650 bp, Homo sapiens
ggcgcggtcgaggcccggaggcggcggcgcaggaggaagcggaggaggtcgggcgctcggggcccgggaggcgggccgcgcagcgccgcagccccgggctcgccatgctcctggcctcggccgtggtggtctgggaatggctgaacgagcacggccgctggcgtccctacagcccagcggtgagccaccacatcgaggcggtggtccgcgccggcccccgcgcggggggcagcgtggtgctgggccaggtggacagccgtctcgcgccctacatcatcgacctgcagtccatgaaccagttccgccaagacacgggaactctccgcccagttcgccgcaactactacgacccctcctcggcccctgggaagggcgtggtgtgggagtgggagaacgacaatggctcctggacgccctacgacatggaagtgggcatcaccatccagcatgcctatgagaagcagcacccctggatcgacctcacttccattggctttagctacgtaattgacttcaacaccatgggccagatcaaccgtcagacccagcgccaacgccgcgtccgccggcgcctcgacctcatctaccccatggtcacagggaccttgcctaaggctcagtcctggccagtcagccctgggccagccacctcgccccccatgtccccctgctcctgtccccagtgtgtcttggtgatgagtgttaaggcagccgtggtcaatggcagcactgggcccctacagctgccagtgacccgcaagaacatgccgcctcctggagtggtcaagctacccccactgccaggctctggggccaagccactggacagcacaggcaccattcgaggcccactgaagaccgccccatcgcaggtgatccggagacaagcctccagcatgcccactgggacaaccatgggctctcctgccagtcccccaggacccaacagcaagaccggaagggtggccctggccaccttgaatcgtaccaacctgcagcgactggccattgcccagtcccgggtgctgatcgcctctggggtccccacagtcccagtgaagaacctaaatgggtccagtcctgtcaaccctgccttggcaggaatcactgggatcctcatgagtgcagcggggctgcctgtgtgtctcaccaggccaccaaagctggtcctacacccaccccccgtcagcaagagtgaaataaaatccatcccaggggtttccaacacaagccgcaagaccaccaaaaaacaagccaagaaaggtaaaaccccagaggaagtgctaaaaaaatatctacagaaagtccggcacccaccagatgaggactgcaccatctgtatggaacgcctcacggccccctcaggctacaagggcccgcagcctacggtaaaacctgacctggtagggaagctgtccagatgcggccacgtctaccacatctactgcttggttgccatgtacaacaatgggaacaaggatggaagtttgcagtgtccaacctgcaagaccatttatggggtgaagacaggcacccaacctccagggaagatggagtaccacctcatcccccactccttgcctggccacccagactgcaaaaccatccggatcatctacagcatcccccccggcattcagggaccggaacacccgaatcctgggaagagtttcagcgcccgaggcttcccacgacactgttaccttccggacagcgagaaagggagaaaagttctgaagctgctgctcgtggcctgggatcgccgcctcatttttgccattggcacctccagcaccacaggcgagtcagacaccgtcatctggaatgaggtccaccacaagacagagtttggctctaatctcactggccatggctacccagatgccaattacctggataatgtgctggctgaactggctgcccagggcatctctgaggacagcactgcccaggagaaggactgaggccagaaaagctttgaggtgggaggggccatggagactgcaggacaggaagtgaggagagtgagtcaatgtagaagaagttggtgtcctgccctcccaactttctatcctcccctcctgccctgtgtccatccctcatccctcccaaccacagtgggagccagactgaatatagcgacatcattcataaatctcatccaacacaaagggagatgggatgagggccatcctgggtctgttcccatggagtttttggtgctgggtaggcaggaatcccctccctaccccacctcccaagtaggggcatggtcagcacacctagggtatgggcagtgcttaggcactccatatcctggctttgggaagccggggtttcttgcctcagccggcttcttgctacttccactctgctttgagactggagtttctgctattctccctctgctggaggcagggagctctcactgtgcaaggttggggggtgggcaaaggggtgaatcactaaactgctgtgacatcagaaactgatgccttggtgtagagcaaggaagcacttcttcccaagagggtcggagaaggaaaagcctctgggagcacattctgctgtcatcacagtccttggcttctctgggccctcctctcctcctcacagctctcacctgtccaaagaggcatctggttctctcatgtggatggatggactctggggttcctctttggagtggcatcccatgatgctgtttctagaccctctctgatcaaaccagagcctgcatcccactgagcatctgaactgtcctcagggagaggagcccacagccttcttcccaactcattctagaccagctcaaagattccatgagtttcatcgagtcactgtgagtggagcccatgctgggctctgtgccctctgtgtctgtgcatgcgcgtgtgtgtgtgggcgtgtgtgcattgctgggccagcttgaagggaaggcccgtcatgtccctgcactctgttttgcaagatgccaaaccccagttctgatggggctccaacagccaggctgtggtcctttgacgttcctcacctgttgccaacctatcccgtagtgaactgaaaccccaatgaagacagaactgtgcctggggagatgcaatgaggtgagggctgaactcatccttttatatttcttttcaagattggatcagagctcatctccatccagtcttgtttctatgaaggcttcaatctgtttccatgcaaatttgctaatcagagcccagagctgctgggtccctcatctccctcatctattatagattgacttacagcagggagagaatctctttagctcattcctaatggggttgggatcacaatatggtctggtccaatctgcatcttgttgtgtcccaagaccctatctcctccccaacattcttattgcctttggctcccagtaaggaacgaattgggggccagggaggagaacaggggggatcaagaagggaaacccaattccccctttgaaagtgggttctttgaactatgtgtttgggggaagttcctctggatactaatttgaatttatatacctcatgttttgggggtttgacgtatatatatatatatatatatatatatgcatatatatttcataatatttggaaggtttttgatgctagaaaaatggaaacaagagaaccttcaaaaatggtacttagatgggaactggaggccaatctttcataaagccagccccatagctgcttgctgttaggcctccagccattttgacattggggtggatagtcgattcacctgcctgtcagtcgattcacctgcctgtcacccagttctgtggatgtgctggtgctgagcctttgctctctttccaaatggttacagggatgttgatcagctccaccagagggagctctgatgggaggaattgctctgccatccttgtccctgtgtctcctgtcggcaggcagccattgtatctcaccagcagaccaggagactggtcccaaggttactgcaccacagggcaatttcctgccatagttaggaaggaaacacctgaactaaatggaagagacatccctgcggtgtttaatatcacacccatgccctttgtcaggttaccatgtacagagattacttggagagcctcatgccgtctctaccttcgcacactggtcaagtatctgctgagcttcttggccgcaaggatgcagaaataggctgagggtccatgggaagaaagacacaatgaggcagtaggaggtggggaagaaaagaagacagactttcaaaatggaattaggcactggggagagatcagtttccccacatcagggagaagaaggtataggtggggaagggggtggccaggagcagaaggaagaagactcaagatggaaagggagccgctgtgcctgtggcaataccacttggagaggtcgacttcataccttcaagccttttcccctgggcttttgattgtgtctgtgccccctttcttgtcctctctgcagatgcccagtaggggctacctcatcctcgtgctgttcttgtgtggctttctgggcagtagggatcttgaatttcctttctaacactgtgcccggcaaggcggggagcattcctctgccctttgtcttgtgccaacctggaaaggtgcagtctagatttcagtgagaaccctgccagctgagccctgtgcatctactaccttgacacagagtgttttcccactagaagctctgctctgctctcctggcccaagtaggggattccatgccttccctttcatggtcttagcaccagcagcctagtttctcccttccagagtctccagggatgacaaattggattggagacaaacctcgtcagatgctcatcccctaaaaggttaattgtgtatttgtggctgcgtgtgcctttgtgttttcattctcttcccatttttgtacattttggtcttctctgtggttttatacttggtcaaaagtactcgtcttggtattgcactgttgtgtgcatgagaaaactgggggaaggctcactggtacaagaaaggacccctgacccctttccttctctgtggtccccggcattagattgggggttctgggagaggcaggtgaatgtcctaagtgaattgttctgtttgtaactggaatgtttttgaagtctttggtgttgctccgtgaaaggacatcgccacctggtgctcatgaggtgtctttgcagaacaataaatggcaaatgaacaaccacaaaattgttactcttgttggccttctgctgtttgtagattagtgcacctatctgtgagggatttgggttacctccctgagtctgtaagcaaccacaagccctgccactgggtgggggaagtccctccccaaccacttaaaaacaaattttccacatattacccacccacacatttgacctggctagactctttgtttgcctaaaggaacagaccacattgctgggaaaatgagtaagtgaacgtgtgggagaaaaacacttttagaatcacgaatattcacttttaaaggtctctttgcctggctgcaatatagtgtgtgtttaaattatttacaggctgttgtttctcaaataaatgtttaatattaatcattcccaaactgacaagaacacaaaaataaaatgcaaatacagagcc

SEQ ID NO: 167 - DNA, 1629 bp, Homo sapiens
gggccgccccaagggctcctcccgacctcccggcctgccgctccggccactgcgggatccagaaacatgtcgaccacacttctgtccgccttctacgatgtcgacttcttgtgcaagacagagaaatccctggccaacctcaacctgaacaacatgctggacaagaaggcggtggggacgcctgtggccgccgcccccagctcgggcttcgcgccgggattcctccgacggcactcggccagcaacctgcatgcactcgcccaccccgcgcccagccccggcagctgctcgcccaagttcccgggcgccgctaacggcagcagctgcggcagcgcggcggccggcggtccgacctcctacggcacccttaaggagccgtcggggggcggcggcacagccctgctcaacaaggagaacaaattccgggaccgctcgtttagcgagaacggcgatcgcagccagcacctcctgcacctgcagcagcagcagaaggggggcggcggctcccagatcaactccacgcgctacaagaccgagctgtgccggcccttcgaggagagcggcacgtgcaagtacggcgaaaagtgccagttcgcgcatggcttccacgagctgcgcagcctgactcgccatccgaagtacaagaccgagctgtgccgcacctttcataccatcggcttctgcccctatgggccgcgctgccacttcatccacaacgcggacgagcggcggcccgcgccgtcggggggcgcctccggggacctgcgtgcctttggcacgcgcgatgcgttgcacctgggcttcccgcgggagccgcggcccaagttgcaccacagcctcagcttctcgggcttcccgtcgggccaccatcagcccccgggcggcctcgagtcgccgctgctgctcgacagccccacgtcgcgcacgccgccgccgccctcctgctcttcggcctcgtcctgctcctcctccgcctcctcctgttcctcggcctccgcggcctccacgccctcggggaccccgacatgctgcgcctccgcggcggccgcgctgcgtctgctgtacggcaccgggggcgccgaggacctgctggcgccgggggccccgtgcgcggcctgctcgtcggcctcgtgcgccaacaacgccttcgccttcggtccggagctcagcagcctcatcacgccgctcgccatccagacccacaactttgccgccgtggccgccgccgcctactaccgcagtcagcagcagcagcagcagcagggcctggcgccccccgcgcagccgccggcgccgcccagcgcgaccctccccgccggggccgccgcacctccctcgccgcccttcagcttccagctgccgcgccgcctgtccgactcgcccgtgttcgacgcgccccccagccccccggactcgctgtcggaccgcgacagctacctaagcggctccctgagctccggcagcctcagcggctctgagtctcccagcctcgaccctggccgccgcctgccaatcttcagccgcctctccatctccgacgactgaggcaagagggcgccagtgaggaggaagggaaggcggttcagagatgttggaggacacccctcgccatctcgcccttgctggggg

SEQ ID NO: 168 - DNA, 6723 bp, Homo sapiens
cattcccaacttcggcctgtgctccagaggaagccttcaacgcagagctggatgggggaggggtggagggcagtcgctgtgaacgtccaggtgggagtctggggaccaggtactgcagggaagggctaaaagataggtcggggtaacccttcagatctggctcagctagcctgtctccaagatttaggactctgaatctctgtgggctcctccctgtccccactcccaaacgcctgacgcggtgccccctcgccctccgctgctccttctaccgctttccctcctccctcccatgtcttttccgtccttggtctagggctctcggcctgcgcctctgcaaacaccccctcccctccaactccggcagaactccgaggggaggggccggcacgcccttcccgcctgtggtcagagggggcagccgcagccccgggtttggggggcaggggccatctctgcgccccgcccgatcaggccactcggcgcactaggggtggagggcgggaagcgtgactcccagagaggggggtccggcttgggcaggtgcgggcactggcagggcccaggcgggctccgggggcgggcggttcaggttacagcccagctgggggcagggggcggcccgcggtttgggcgagttcgccagcctcgaaaggggccgggcgcatataacgggcgccgcggcggggagaagacgcagagcgctgctgggctgccgggtctcccgcttcctcctcctgctccaagggcctcctgcatgagggcgcggtagagacccggacccgcgccgtgctcctgccgtttcgctgcgctccgcccgggcccggctcagccaggccccgcggtgagccatgattcgcctcggggctccccagtcgctggtgctgctgacgctgctcgtcgccgctgtccttcggtgtcagggccaggatgtccgtaagtcttcccccgccgctgcctgcctgcctgctttccatgcgtccctcagcatccttctccccggcccgctccagctctggagcccgcggctccgggctaaaacggctcccggggtcgtagcgcgccgacttaggcacaggacacgcagaagttcaccaagaagagttctgccaatcaagactctgtcccagggtcctcggtgccctacgcagttgcaagtatttgcaggtccctacgttgcgctagaatactgaacttgcaaagtgttggctcggagaagtttgcgcacagatataaatgggctcttttccaccagctttgataattaggcgcacatgcacacagctcgcctcttcgaagcacttcgagttcagcaaaaacagatctcaactcatcgaacttaggtgaagtaggaaagagagagcgcgagcgagggagcaagcaaacgccaaagggttgacttcacagcctgtccaaggcttggtggctggtgggctcaaagcagagttagacaaaggggactaacactctgacactggtgggctgaaatcccaggccacaaagaacggcttccgataggccctctgagacctcagcgcctctttaggtaccctccccctcccagctggccctggagcaaggtgcagccctagcgctcatctcgacttccctccgtccgcctgcgcctctcttctgataaagggtacagaaacttccagtaggagaggccatctgaaagacgataacattccaaccagaccgtgcttttcaaatgcccccgaaaatagcgcccccttccccgcggtcttaccccattccccgccgccccgaggtactacaatgagttacttttctaaattctggaactcaccgagccaggctgcgtggtgtgtgtgtgtgtgcgtgtgtgtgtgtgtatgtgtgtgtagggaaggggagcaggctggtcgattggctacggttgctacaactatttcaaccggtatagttagagatggctcttgtagtcggtcaatgctgttcggactgcacctttctaccctcttgaaggtcactgtctgggattatattcaggacaaacgaagcctggaaagtgtattaggtagagaggattttttttccacgtgtttgggcacgtttccgacggctgggattccagcctgtctttgtatgttacagattgtaaatcaatcgcagagggaaactcttcggcgggggaaataaaagttctctgccttcgaggctctgtgggccctctcctgccaccaggctgtttccagggatagcgtggaaggcggcgggctcaggcgggctttccggtcattagcgcgacggggcagggctggagctgcgcgcagctgcgaggagccgggagcaggagactctggccggtcacccggtagtgcgctaagctggaggccgctcctgggcatttgaggaatacagcgtgactatacgtggcctggactcagactgactatatttttgtactaaatttacaagcacacgcccacaaagctgtcttcttgactgacccctgccttagtgagcaatggaattagctgggtggctttaaaataattctcaaattctccatccggtattagggtcgcttgcttaattaggcggtagaggtctctcatcgccgcatctttcctgggagggagtgattccacagcttctccggcccaaaccttccagtcgctcctcctcccaagagggagtgtgattctgcatccgagaggctgattttgcgccctggagcatcccaccttttataacttcccccgcctgggtcagcggacccaaaggtgtgacgtggggaaatgcgcagtctgcgtggacgtcaggaatgtcagacacctagagctcggccacacccctcctctccatctttccacgagtttgagaaacttactggcggcggggtctttgaccctcatctgcattcagagccctcgcctccgaaagtgccctggctcagggagagatctcaatcctcctttgtgaggcttgtttgcattgggagattggcagcgatggcttccagatggggctgaaacgctgcccgtatttatttaaactggttcctcgcagagacctgtgaatcgggctctgtgtgcgctcgagaaaagccccattcatgagagacgaggtccagtgggttctctcgtactcccagaccccctctcccacaatgcccccctgtgcccagcgccgccgcctctctcgctccagccctggccagagcggcggtgaagcaaaacagttccccgaaagaggtagctttttaattggcttgccacaaagaatcacttatacggcctgcggtaatgaggggaaccggatcaggcgggccgggatgctatcggcagccgttttggagcagcaattatggtggtgctgggctcctccgtccacacctaggggatcctaggccggttacgccctggctcctttctggggcagtcatttaatcccacttttcactctcccggtgtctgtgagcgagccgtgtccagagccgcagccaacagagtcactcagcggctcttacacccagcgcccagtggccccgccctgcgccggccgttcccgggccgcccttccccgggaaatctgatccgcacggggagtggcccctctcctagcatttccccctctcctccctgggtcctcatgggcgagggtgggctctcctgtagtctgggctggagcgcattaaccgatgccccctctcccacaccttcctcaccgcctgcattccactgctccagctattttaacaggcgggtgtgtccccgcaacttctgtattttccctggaatccctcaccctcctgtgattatcttgcccaaaggctaggcggatttcttctagtgggaaagtaaaaaggaacgtttatcttttggattttcactctctttaaagagcagtgggcaggctcgtttctttctccgcctctgggtttgtggctctttcctattattcatcccctgctgctgctattgccttggggattttgatgagaaaaaccaggctgggcgctccctacgacgtggtggcctctaacgccttggctgctaaggagcgctcttgtcagcacaggtttcatttgcagcatgaattccagacggcagggcgctggtggaggagactagtccctgctattcttcctctgcagtcttggaggaggccaggcctggactggcaatcttagccctagccaggtattcaacgacccctgctccccaaactggggtggcctgttttcagatggaggcagggcctctccaggcagggctacaggtggaggtgagcactggggggactttggctccactggcctcctaagcagtttattagcctgcccaagcccaagtgtattgtttgaatgggtctatcccctcccaattggtcctaatctaatatggtcaaagaatgagacaagatcctaattcttataggctccgtcttttcaccccctttcatttatatacctattttgggaggcctcagcgtgcttcataggattcccaattttgtaggtagaattttctacattccctcttgaatgttagttgtcaggtgtagtttggctaatccccataattccccagaggaaagggcagaagaaggaagacttctctgctcctgggcggtggaggaggtctcgcctctccgaattcaaatgctgaacaatgtaggctggggccacctggacatatagaacttaaaaattattttcctaaaacatcattgatttttccatgtattcaacaaatatttattatgcaccttgcaccatgttgtctattcaccagtgaaaatcttgacccagcaatgaaggtggggggttactatactatattctctttacccacctaatacgggggagaccaggtgatggagtgggtggagggagttggagggtgagccggaagggaggagaccaggatatctgaataggaattctgtcaagttgactgcaacctctctctttttctctctggctccccaccccctccttcccttggctctctgcttctccctccccacccttggtgcagaggaggctggcagctgtgtgcaggatgggcagaggtataatgataaggatgtgtggaagccggagccctgccggatctgtgtctgtgacactgggactgtcctctgcgacgacataatctgtgaagacgtgaaagactgcctcagccctgagatccccttcggagagtgctgccccatctgcccaactgacctcgccactgccagtggttgtaatttatttatttcctgttcaacataaataaattacttgcaagcactgcaaacacgctcccatagatgctggtcgtctctgcaaagcagaggggctagttatccatgggacctggtagctggggtagaaaaggaaaaggccacttctcacttgcaggttgaaactgagtgaatgagcctgagacactagaggggtccttctttgcccaacatctccaaaaacatttgcttccaagacacatgaaggacagatgtaattctacaaaaaaaaaaaaaaaaaatcctctctgaaatcatctctgcaaattactagagccactatggagatcaaatgctctgtcttggccaatccacgaattaattcctcctctgccaccgataccttgtcttctccttagaagacttctatgtatgtggtcttcagtgtggagaaagctctgccagctagtggggagactgcaggggcagaggctccctctttgagttatggaacattggtggtagtttcctctctgctattacctctcttggagttgaccattaattcagaagcaaaataataagagagggaagggctaggctttgggagttctagtggggacgggtggagacagagccccatgtatctgcactgtagtgggtggttataaactcccagttagatccagtgctggtggatgatatatgtgcaggtgaccccttccccagcattcaatacaagatgtcctatctcccctgcagagtgagtggggacgcttgtgtaggttttttgggtagctcttgctgtccccttcctgctgaagtagagaaggccgtggcaagggaagtgagaagctgcctttccttaacacttcaccaacactggctccctaatgtgcacattcccagatcctttctgaggggcccgtgtgagtgaagtgttgattgcctttactattttgctgctactgtgaaggagaggttattgactggggtggcacaggctatgatgctccgatgctcttcataactcatatgccttgctgtttttgtgtttttatttgtgcttgcttcaaggagacccagctctaatgtaagacctttctaagtacctaactcttcctctgggagggcttggggttcgggaacggctccctacctgtggggggaagagagactgaatctgtgctttccttcttgtggctgattagatcttgagctcttcattgcctttttgtgctgcccttgctcctttcttttgcatgctgcctgctttttgaataacaaagcctgggtcacctccatatcctcatgggacctcagcaaccccaggccacagtggccctaacaccccaacagaggggttcagtggagtcacaggaacgtgccgccttccttgattgtgtccttttacttgtttgatctaatgagtgtttgagtgacaagaataggtatttttccatctcaagattcttaccttcttcttctctatattttttccttgcagggcaaccaggaccaaag

SEQ ID NO: 169 - DNA, 4403 bp, Homo sapiens
cgggaacgcgccgcggccgcctcctcctccccggctcccgcccgcggcggtgttggcggcggcggtggcggcggcggcggcgcttccccggcgcggagcggctttaaaaggcggcactccaccccccggcgcactcgcagctcgggcgccgcgcgagcctgtcgccgctatgcctccgcgcgcgccgcctgcgcccgggccccggccgccgccccgggccgccgccgccaccgacaccgccgcgggcgcggggggcgcggggggcgcggggggcgccggcgggcccgggttccggccgctcgcgccgcgtccctggcgctggctgctgctgctggcgctgcctgccgcctgctccgcgcccccgccgcgccccgtctacaccaaccactgggcggtgcaagtgctgggcggcccggccgaggcggaccgcgtggcggcggcgcacggctacctcaacttgggccagattggaaacctggaagattactaccatttttatcacagcaaaacctttaaaagatcaaccttgagtagcagaggccctcacaccttcctcagaatggacccccaggtgaaatggctccagcaacaggaagtgaaacgaagggtgaagagacaggtgcgaagtgacccgcaggccctttacttcaacgaccccatttggtccaacatgtggtacctgcattgtggcgacaagaacagtcgctgccggtcggaaatgaatgtccaggcagcgtggaagaggggctacacaggaaaaaacgtggtggtcaccatccttgatgatggcatagagagaaatcaccctgacctggccccaaattatgattcctacgccagctacgacgtgaacggcaatgattatgacccatctccacgatatgatgccagcaatgaaaataaacacggcactcgttgtgcgggagaagttgctgcttcagcaaacaattcctactgcatcgtgggcatagcgtacaatgccaaaataggaggcatccgcatgctggacggcgatgtcacagatgtggtcgaggcaaagtcgctgggcatcagacccaactacatcgacatttacagtgccagctgggggccggacgacgacggcaagacggtggacgggcccggccgactggctaagcaggctttcgagtatggcattaaaaagggccggcagggcctgggctccattttcgtctgggcatctgggaatggcgggagagagggggactactgctcgtgcgatggctacaccaacagcatctacaccatctccgtcagcagcgccaccgagaatggctacaagccctggtacctggaagagtgtgcctccaccctggccaccacctacagcagtggggccttttatgagcgaaaaatcgtcaccacggatctgcgtcagcgctgtaccgatggccacactgggacctcagtctctgcccccatggtggcgggcatcatcgccttggctctagaagcaaacagccagttaacctggagggacgtccagcacctgctagtgaagacatcccggccggcccacctgaaagcgagcgactggaaagtaaacggcgcgggtcataaagttagccatttctatggatttggtttggtggacgcagaagctctcgttgtggaggcaaagaagtggacagcagtgccatcgcagcacatgtgtgtggccgcctcggacaagagacccaggagcatccccttagtgcaggtgctgcggactacggccctgaccagcgcctgcgcggagcactcggaccagcgggtggtctacttggagcacgtggtggttcgcacctccatctcacacccacgccgaggagacctccagatctacctggtttctccctcgggaaccaagtctcaacttttggcaaagaggttgctggatctttccaatgaagggtttacaaactgggaattcatgactgtccactgctggggagaaaaggctgaagggcagtggaccttggaaatccaagatctgccatcccaggtccgcaacccggagaagcaagggaagttgaaagaatggagcctcatactgtatggcacagcagagcacccgtaccacaccttcagtgcccatcagtcccgctcgcggatgctggagctctcagccccagagctggagccacccaaggctgccctgtcaccctcccaggtggaagttcctgaagatgaggaagattacacagctcaatccaccccaggctctgctaatattttacagaccagtgtgtgccatccggagtgtggtgacaaaggctgtgatggccccaatgcagaccagtgcttgaactgcgtccacttcagcctggggagtgtcaagaccagcaggaagtgcgtgagtgtgtgccccttgggctactttggggacacagcagcaagacgctgtcgccggtgccacaaggggtgtgagacctgctccagcagagctgcgacgcagtgcctgtcttgccgccgcgggttctatcaccaccaggagatgaacacctgtgtgaccctctgtcctgcaggattttatgctgatgaaagtcagaaaaattgccttaaatgccacccaagctgtaaaaagtgcgtggatgaacctgagaaatgtactgtctgtaaagaaggattcagccttgcacggggcagctgcattcctgactgtgagccaggcacctactttgactcagagctgatcagatgtggggaatgccatcacacctgcggaacctgcgtggggccaggcagagaagagtgcattcactgtgcgaaaaacttccacttccacgactggaagtgtgtgccagcctgtggtgagggcttctacccagaagagatgccgggcttgccccacaaagtgtgtcgaaggtgtgacgagaactgcttgagctgtgcaggctccagcaggaactgtagcaggtgtaagacgggcttcacacagctggggacctcctgcatcaccaaccacacgtgcagcaacgctgacgagacattctgcgagatggtgaagtccaaccggctgtgcgaacggaagctcttcattcagttctgctgccgcacgtgcctcctggccgggtaagggtgcctagctgcccacagagggcaggcactcccatccatccatccgtccaccttcctccagactgtcggccagagtctgtttcaggagcggcgccctgcacctgacagctttatctccccaggagcagcatctctgagcacccaagccaggtgggtggtggctcttaaggaggtgttcctaaaatggtgatatcctctcaaatgctgcttgttggctccagtcttccgacaaactaacaggaacaaaatgaattctgggaatccacagctctggctttggagcagcttctgggaccataagtttactgaatcttcaagaccaaagcagaaaagaaaggcgcttggcatcacacatcactcttctccccgtgcttttctgcggctgtgtagtaaatctccccggcccagctggcgaaccctgggccatcctcacatgtgacaaagggccagcagtctacctgctcgttgcctgccactgagcagtctggggacggtttggtcagactataaataagataggtttgagggcataaaatgtatgaccactggggccggagtatctatttctacatagtcagctacttctgaaactgcagcagtggcttagaaagtccaattccaaagccagaccagaagattctatcccccgcagcgctctcctttgagcaagccgagctctccttgttaccgtgttctgtctgtgtcttcaggagtctcatggcctgaacgaccacctcgacctgatgcagagccttctgaggagaggcaacaggaggcattctgtggccagccaaaaggtaccccgatggccaagcaattcctctgaacaaaatgtaaagccagccatgcattgttaatcatccatcacttcccattttatggaattgcttttaaaatacatttggcctctgcccttcagaagactcgtttttaaggtggaaactcctgtgtctgtgtatattacaagcctacatgacacagttggatttattctgccaaacctgtgtaggcattttataagctacatgttctaatttttaccgatgttaattattttgacaaatatttcatatattttcattgaaatgcacagatctgcttgatcaattcccttgaatagggaagtaacatttgccttaaattttttcgacctcgtctttctccatattgtcctgctcccctgtttgacgacagtgcatttgccttgtcacctgtgagctggagagaacccagatgttgtttattgaatctacaactctgaaagagaaatcaatgaagcaagtacaatgttaaccctaaattaataaaagagttaacatccc

SEQ ID NO: 170 - DNA, 4066 bp, Homo sapiens
cctccatctcttttcctccgcctccgccggcgcgatgggcgaaccgctgacggacagcgagaagcggaagcagatcagcgtgcgcggcctggcggggctaggcgacgtggccgaggtgcggaagagcttcaaccggcacttgcacttcacgctggtcaaggaccgcaatgtggccacgccccgcgactacttcttcgcgctggcgcacacggtgcgcgaccacctcgtgggccgctggatccgcacgcagcagcactactacgagcgcgaccccaagcgcatttattatctttccctggaattctacatgggtcgcacgctgcagaacacgatggtgaacctgggccttcagaatgcctgcgatgaagccatctatcagttggggttagacttggaggaactcgaggagatagaagaagatgctggccttgggaatggaggcctggggaggctggcagcgtgtttccttgactcaatggctaccttgggcctggcagcatacggctatggaatccgctatgaatttgggatttttaaccagaagattgtcaatggctggcaggtagaggaggccgatgactggctgcgctacggcaacccctgggagaaagcgcggcctgagtatatgcttcccgtgcacttctacggacgcgtggagcacacccccgacggcgtgaagtggctggacacacaggtggtgctggccatgccctacgacaccccagtgcccggctacaagaacaacaccgtcaacaccatgcggctgtggtccgccaaggctcccaacgacttcaagctgcaggacttcaacgtgggagactacatcgaggcggtcctggaccggaacttggctgagaacatctccagggtcctgtatccaaatgataacttctttgaggggaaggagctgcggctgaagcaggagtacttcgtggtggccgccacgctccaggacatcatccgccgcttcaagtcgtccaagttcggctgccgggaccctgtgagaacctgtttcgagacgttcccagacaaggtggccatccagctgaacgacacccaccccgccctctccatccctgagctcatgcggatcctggtggacgtggagaaggtggactgggacaaggcctgggaaatcacgaagaagacctgtgcatacaccaaccacactgtgctgcctgaggccttggagcgctggcccgtgtccatgtttgagaagctgctgccgcggcacctggagataatctatgccatcaaccagcggcacctggaccacgtggccgcgctgtttcccggcgatgtggaccgcctgcgcaggatgtctgtgatcgaggagggggactgcaagcggatcaacatggcccacctgtgtgtgattgggtcccatgctgtcaatggtgtggcgaggatccactcggagatcgtgaaacagtcggtctttaaggatttttatgaactggagccagagaagttccagaataagaccaatggcatcaccccccgccggtggctgctgctgtgcaacccggggctggccgataccatcgtggagaaaattggggaggagttcctgactgacctgagccagctgaagaagctgctgccgctggtcagtgacgaggtgttcatcagggacgtggccaaggtcaaacaggagaacaagctcaagttctcggccttcctggagaaggagtacaaggtgaagatcaacccctcctccatgttcgatgtgcatgtgaagaggatccacgagtacaagcggcagctgctcaactgcctgcacgtcgtcaccctgtacaatcgaatcaagagagacccggccaaggcttttgtgcccaggactgttatgattgggggcaaggcagcgcccggttaccacatggccaagctgatcatcaagttggtcacctccatcggcgacgtcgtcaatcatgacccagttgtgggtgacaggttgaaagtgatcttcctggagaactaccgtgtgtccttggctgagaaagtgatcccggccgctgatctgtcgcagcagatctccactgcaggcaccgaggcctcaggcacaggcaacatgaagttcatgctcaacggggccctcaccatcggcaccatggacggcgccaacgtggagatggccgaggaggccggggccgagaacctcttcatcttcggcctgcgggtggaggatgtcgaggccttggaccggaaagggtacaatgccagggagtactacgaccacctgcccgagctgaagcaggccgtggaccagatcagcagtggctttttttctcccaaggagccagactgcttcaaggacatcgtgaacatgctgatgcaccatgacaggttcaaggtgtttgcagactatgaagcctacatgcagtgccaggcacaggtggaccagctgtaccggaaccccaaggagtggaccaagaaggtcatcaggaacatcgcctgctcgggcaagttctccagtgaccggaccatcacggagtatgcacgggagatctggggtgtggagccctccgacctgcagatcccgccccccaacatcccccgggactaggcacaccctgccttggcgggaccagcgggcatttgttttcttgctgactttgcacctccttttttccccaaacactttgccagccactggtggtccctgcttttctgagtaccatgtttccaggaggggccatgggggtcagggtggttttgagagagcagggtaaggaaggaatgtgctagaagtgctcctagtttcttgtaaaggaagccagagttgacagtacaaagggtcgtggccagccctgcagcttcagcacctgccccacccagagtgggagtcaggtggagccacctgctgggctcccccagaactttgcacacatcttgctatgtattagccgatgtctttagtgttgagcctctggattctggggtctgggccagtggccatagtgaagcctgggaatgagtgttactgcagcatctgggctgccagccacagggaagggccaagccccatgtagccccagtcatcctgcccagccctgcctcctggccatgccgggaggggtcggatcctctaggcatcgccttcacagccccctgccccctgccctctgtcctggctctgcacctggtatatgggtcatggaccagatggggctttccctttgtagccatccaatgggcattgtgtgggtgcttggaacccgggatgactgagggggacactggagtgggtgcttgtgtctgctgtctcagaggccttggtcaggatgaagttggctgacacagcttagcttggttttgcttattcaaaagagaaaataactacacatggaaatgaaactagctgaagccttttcttgttttagcaactgaaaattgtacttggtcacttttgtgcttgaggaggcccattttctgcctggcaggggcaggtctgtgccctcccgcttgactcctgctgtgtcctgaggtgcatttcctgtttgttacacacaagggccaggctccattctccctccctttccaccagtgccacagcctcgtctggaaaaaggaccaggggtcccggaggaacccatttgtgctctgcttggacagcaggcctggcactgggaggtgggggtgagcccctcacagccttgcccctccccaaggctcgaacctgcctcccattgcccaagagagagggcagggaacaggctactgtccttccctgtggaattgccgagaaatctagcaccttgcatgctggatctgggctgcggggaggctctttttctccctggcctccagtgcccaccaggaggatctgcgcacggtgcacagcccaccagagcactacagccttttattgagtggggcaagtgctgggctgtggtcgtgccctgacagcatcttccccaggcagcggctctgtggaggaggccatactcccctagttggccactggggccaccaccctgaccaccactgtgcccctcattgttactgccttgtgagataaaaactgattaaacctttgtggctgtggttggctgaaaaaaaaaaa

SEQ ID NO: 171 - DNA, 2370 bp, Homo sapiens
cacgagggagcgctaacgtctttctgtctccccgcggtggtgatgacggtgaaaactgaggctgctaagggcaccctcacttactccaggatgaggggcatggtggcaattctcatcgctttcatgaagcagaggaggatgggtctgaacgactttattcagaagattgccaataactcctatgcatgcaaacaccctgaagttcagtccatcttgaagatctcccaacctcaggagcctgagcttatgaatgccaacccttctcctccaccaagtccttctcagcaaatcaaccttggcccgtcgtccaatcctcatgctaaaccatctgactttcacttcttgaaagtgatcggaaagggcagttttggaaaggttcttctagcaagacacaaggcagaagaagtgttctatgcagtcaaagttttacagaagaaagcaatcctgaaaaagaaagaggagaagcatattatgtcggagcggaatgttctgttgaagaatgtgaagcaccctttcctggtgggccttcacttctctttccagactgctgacaaattgtactttgtcctagactacattaatggtggagagttgttctaccatctccagagggaacgctgcttcctggaaccacgggctcgtttctatgctgctgaaatagccagtgccttgggctacctgcattcactgaacatcgtttatagagacttaaaaccagagaatattttgctagattcacagggacacattgtccttactgatttcggactctgcaaggagaacattgaacacaacagcacaacatccaccttctgtggcacgccggagtatctcgcacctgaggtgcttcataagcagccttatgacaggactgtggactggtggtgcctgggagctgtcttgtatgagatgctgtatggcctgccgcctttttatagccgaaacacagctgaaatgtacgacaacattctgaacaagcctctccagctgaaaccaaatattacaaattccgcaagacacctcctggagggcctcctgcagaaggacaggacaaagcggctcggggccaaggatgacttcatggagattaagagtcatgtcttcttctccttaattaactgggatgatctcattaataagaagattactcccccttttaacccaaatgtgagtgggcccaacgagctacggcactttgaccccgagtttaccgaagagcctgtccccaactccattggcaagtcccctgacagcgtcctcgtcacagccagcgtcaaggaagctgccgaggctttcctaggcttttcctatgcgcctcccacggactctttcctctgaaccctgttagggcttggttttaaaggattttatgtgtgtttccgaatgttttagttagccttttggtggagccgccagctgacaggacatcttacaagagaatttgcacatctctggaagcttagcaatcttattgcacactgttcgctggaattttttgaagagcacattctcctcagtgagctcatgaggttttcatttttattcttccttccaacgtggtgctatctctgaaacgagcgttagagtgccgccttagacggaggcaggagtttcgttagaaagcggacctgttctaaaaaaggtctcctgcagatctgtctgggctgtgatgacgaatattatgaaatgtgccttttctgaagagattgtgttagctccaaagcttttcctatcgcagtgtttcagttctttattttcccttgtggatatgctgtgtgaaccgtcgtgtgagtgtggtatgcctgatcacagatggattttgttataagcatcaatgtgacacttgcaggacactacaacgtgggacattgtttgtttcttccatatttggaagataaatttatgtgtagacttttttgtaagatacggttaataactaaaatttattgaaatggtcttgcaatgactcgtattcagatgcctaaagaaagcattgctgctacaaatatttctatttttagaaagggtttttatggaccaatgccccagttgtcagtcagagccgttggtgtttttcattgtttaaaatgtcacctgtaaaatgggcattatttatgtttttttttttgcattcctgataattgtatgtattgtataaagaacgtctgtacattgggttataacactagtatatttaaacttacaggcttatttgtaatgtaaaccaccattttaatgtactgtaattaacatggttataatacgtacaatccttccctcatcccatcacacaactttttttgtgtgtgataaactgattttggtttgcaataaaaccttgaaaaataaaaaaaaaaaaaaaaaaaaaaa

SEQ ID NO: 172 - DNA, 2430 bp, Homo sapiens
cacaggggcactgacatctttgctggactcttttaatcctcataaacccaggctgctggcactcgaaatttgagaagggcaatcagtctggcctcttgcctttctggcctgcaggcccagcctgaacaaacaatttaggtggagctcctggaggctggaagcagagaggaggtacctcaccatcctctcctgccagctgttgcagactctgcctggggaactgtttaagggtgagcagaggcatttatctccatgttaacaagcagatgtcatggcacccccagtaccggagctccaagttccgtcatgtctttggcaaaccagccagcaaggagaactgctacgactccgtgcctatcacccgcagcgttcacgacaaccacttctgtgccgtgaacccccacttcattgcagttgtgactgagtgtgctggtggagggggcttcctcgtcatccccctgcaccagacagggaagttggacccccactacccaaaagtctgcgggcacagaggcaacgttttggatgtcaagtggaacccttttgatgattttgagatcgcctcctgttctgaagatgccacaattaagatctggagcatccccaagcagctgctgaccaggaacctcacggcctacaggaaggaactcgtgggccacgcgcgcagagtaggcctggtggagtggcaccccacggccgccaacatcctcttcagtgctggctatgactacaaggtgatgatctggaacctggatacaaaggagtctgtcatcacaagccccatgagtacgattagctgtcaccaagatgtgatcctctccatgtccttcaacaccaacgggagcctgttggccaccacctgcaaagaccgcaagattcgggttattgacccccgagcagggaccgtcctccaggaggccagctacaaagggcaccgggccagcaaagtgctgtttctggggaacctgaagaagctgatgtccacaggcacatcccgatggaacaaccggcaggtggccttgtgggaccaggataacctctctgtgcctctgatggaggaggacctggacggctcctcgggcgtgctgtttcccttctatgacgcggacaccagcatgctctacgtggtggggaagggagatggcaacatccgctactacgaggtgagcgccgacaagcctcacctgagctacctgactgagtaccgctcctataacccacagaaggggatcggtgtcatgccaaagagaggactcgacgtgtcctcctgcgagatcttccgcttctacaagctgatcacaaccaaaagcctcatcgagcccatctccatgattgtgccccgggggtcagaatcctaccaagaggacatataccctccaacaggaggggcccagccctccctgacggcccaggagtggctcagcgggatgaatcgagacccaatcctggtgtcccttaggcctggctctgagctgctgagaccccacccactgcctgcagagagacctatcttcaattccatggccccagcctcaccccggctcttgaatcagacagaaaagctggctgcagaagatggctggaggtcttcctccctgttggaggagaagatgccaaggtgggcagcagaacacaggctggaggagaagaaaacctggctgacaaatggctttgacgttttcgaatgccccccaccaaagacagagaatgagttgctgcagatgttctaccggcaacaggaggagatccgaaggctccgggagctgttgacccagcgagaggtccaggccaaacagttggaactggagatcaaaaacttgcggatgggctcagagcagctctgagcagagacctctgccctcctcaccctcagggacaccactcggctccatggggaggtttagaaccaaaccacaagtcccctcaaggacaaccactatttctatattttttaccagaaaaccaaactctccatcgctgaaagagattccagtgggacatggtgccgtttttctgtttgccttcttgcaacaacagtttctgaattgactttgttttcagatgatgccttctgatgaattctgttattaagggcccatgatgagctgtaacttctcaagaggaaagaacacagtagaaaactagagctggaaggatctaggttgacctgtctgtgattttcaaccctgtggtccagagaatagggaagactggccagacgcactggctcatgcctgtaatcccagcactctgggaggctgaggtgggcggatttcttgaggtcgggagtttgaaaccagtctcaccaggcgcagtggctcacgcctgtaattccagcatgttgggaggccgaggctggtggatcacgaggtcagcagttcgagaccagcctgaccaacatggtgaaaccccatctctactaaaaatccc

SEQ ID NO: 173 - DNA, 2661 bp, Homo sapiens
cttgaacgcctgacctcgtatccacccgcctcagcctcccaaagtgctgggattacaggcatgagccaccacgcccagcccataatttattgattttttaaaatttgtccagccttctattaccacgtcgaatccattagctacagccatcccatgagaagctgagtggattcagccccacctcctgctcacagaccctgtccgagcacctcatttgtcccaacagcattactgcaggacccccaggacgttggactgccagctccctgggtctcctcctctctggggcagatcctcagtcctcccttgacttcacgactgtggccagatcatgtgtggactgtccctctctttgggtctccagagcgcttgcatcaaacacccctaactcagaagtgtgcagccacactgggactcagaacccaacaacagggacagaagactcacgcccttggggtgcccggtctcgtggcatcaggcatgacttccagctcctgcgccttccccagcaactgctgactggggacccagaccgggagctgagcgacgggcctggcgagcgaagctcggggtctcactcaggcaccagcccctccttgccccaggcttgagtgactcacagccctattcaggcaggagctgctcttctggggtatcgcgatccacttaaggatgaggcagacttggtgacaagctggtctgagcagcgcttccagagccagaactgagcccagtgagagcgcaccctggagcagcctggattcctggggtgtccccggcagccacacacagccatgcactacccaactgcactcctcttcctcatcctggccaatggggcccaggcctttcgcatctgcgccttcaatgcccagcggctgacactggccaaggtggccagggagcaggtgatggacaccttagttcggatactggctcgctgtgacatcatggtgctgcaggaggtggtagactcttccggcagcgccatccccctcctgcttcgagaactcaatcgatttgatggctctgggccctacagcaccctgagcagcccccagctggggcgcagcacctacatggagacgtatgtgtacttctatcggtcacacaaaacacaggtcctgagttcctacgtgtacaacgatgaggatgacgtctttgcccgggagccatttgtggcccagttctctttgcccagcaatgtccttcccagcctggtgttggtcccgctgcacaccactcctaaggccgtagagaaggagctgaacgccctctacgatgtgtttctggaggtctcccagcactggcagagcaaggacgtgatcctgcttggggacttcaatgctgactgcgcttcactgaccaaaaagcgcctggacaagctggagctgcggactgagccaggcttccactgggtgattgccgatggggaggacaccacagtgcgggccagcacccactgcacctatgaccgcgtcgtgctgcacggggagcgctgccggagtctgctgcacactgcggctgcctttgacttccccacgagcttccagctcaccgaggaggaggccctcaacatcagtgaccactaccccgtggaggtggagctgaagctgagccaggcgcacagcgtccagcctctcagcctcactgttctgttgctgctatcactcctgtcccctcagctgtgccctgctgcctgagcgtccccctacccccccagggcctgctgccttttgggacttaaaccccagcctcccccgtccatccagccctggggctggggggcttcaactatagttgccctgtgactgtagtccacccctgcctgccttgtttgatttggctcttgttctttggttgggcttgtgcctagattaggagaggaagccaggggccctgcactcatgccacctgccaggtagtgtagtatcaggagtggagacaaagtgggctctgggttggggtaggggaagggagggttcagaaagaggaatgaagatgttgtatgacaagaaggaaagttactgagaacaaaaacccagattggtgagataggacacttgtgcagcagatatgccaatgggccatgtttattgtggatgggtaagaatcaccaggaaaccattaagccccaatagctacaaggagggtggttaatctgctatatcaaactccttccctgaaaccagcaaacaccgggaaacattttggctcattataatccggtgaacaatgcagtcaggcctgttataaccgctgagcagccacactcgcacctcctgggtgctgtagtctgtgttggtacaggcttctgcatgcctggtaaagtccagccaaggctggtcaaggcaacatctccacacagaaaatctgcaccagttatgtaagctaaaaagctgtgtgaacccaggtgtcccggaaaggggctgcaggacacagcaaaatgccagcagcgtgccggacccctcccttccatcctcctctccaaagaacagaggtcaggaaaaacactggctgggacgctagaagggtcatgtgttaactataatcacatttatggtttggaaccatcaccccaaggtaaaaaaaaaaataaaaggtatgtttggcaaaataaaataaaggtaattaaaaacctaaaaaaaaaaaaaaaaaaaa

SEQ ID NO: 174 - DNA, 591 bp, Homo sapiens
  misc_feature (443)..(443): n is a, c, g, or t
gctgttcactgccagctctgatgctgtccactgtgctggcccccatggtcacagctgctgacccagctctggaactcccagacgtcccaggccccacttacgccaggaggcctgggtgtcctgcaagtggagcagcaggggctcctagtgggccaggctgaccgcagagtctccagcaagctgaggtcacagccggagacagggctgtgttctgagggtcttcactccctgcttggtgcccacagggtgcgcactgccagggcagggacagttcctgtggggctcgctctcactgctactgcttcctgggaggtgcatccctcttggtgaagtggcctagtgcccccagccaccctgactccccaccattccctcccacggcaaacgcacaaaacgtcttgagggagattttgacaagtcacccattccaggtgccacagganggggatgtttagtaatccaggatttctctgagaactgggatatgtggcccttttttttttctttttatcttttatctggaaactgggtttgggtcaaccccaggagtatttgcagaaggcccagcacagtggggggtattggctgcag

SEQ ID NO: 175 - DNA, 7247 bp, Homo sapiens
gggaatatattcactaaggattctatctgcttactgctacagacctatgtgttaaggaattcttctcctcctccttgcgtagaagttgatcagcactgtggtcagactgcatttatcttgtcattgccagaagaaatcttggacagaatgtaacagtacgtctctctctgattgcgatggaaggtgataaactgatactcctttattaaagttacatcgcactcaccacagaaaaccattctttaaagtgaatagaaaccaagcccttgtgaacacttctattgaacatgactcatggagaagagcttggctctgatgtgcaccaggattctattgttttaacttacctagaaggattactaatgcatcaggcagcagggggatcaggtactgccgttgacaaaaagtctgctgggcataatgaagaggatcagaactttaacatttctggcagtgcatttcccacctgtcaaagtaatggtccagttctcaatacacatacatatcagggatctggcatgctgcacctcaaaaaagccagactgttgcagtcttctgaggactggaatgcagcaaagcggaagaggctgtctgattctatcatgaatttaaacgtaaagaaggaagctttgctagctggcatggttgacagtgtccgtaaaggcaaacaggatagcacattactggcctctttgcttcagtcattcagctctaggctgcagactgttgctctgtcacaacaaatcaggcagagcctcaaggagcaaggatatgccctcagtcatgattctttaaaagtggagaaggatttaaggtgctatggtgttgcatcaagtcacttaaaaactttgttgaagaaaagtaaagttaaagatcaaaagcctgatacgaatcttcctgatgtgactaaaaacctcatcagagataggtttgcagagtctcctcatcatgttggacaaagtggaacaaaggtcatgagtgaaccgttgtcatgtgctgcaagattacaggctgttgcaagcatggtggaaaaaagggctagtcctgccacctcacctaaacctagtgttgcttgtagccagttagcattacttctgtcaagcgaagcccatttgcagcagtattctcgagaacacgctttaaaaacgcaaaatgcaaatcaagcagcaagtgaaagacttgctgctatggccagattgcaagaaaatggccagaaggatgttggcagttaccagctcccaaaaggaatgtcaagccatcttaatggtcaggcaagaacatcatcaagcaaactgatggctagcaaaagtagtgctacagtgtttcaaaatccaatgggtatcattccttcttcccctaaaaatgcaggttataagaactcactggaaagaaacaatataaaacaagctgctaacaatagtttgcttttacatcttcttaaaagccagactatacctaagccaatgaatggacacagtcacagtgagagaggaagcatttttgaggaaagtagtacacctacaactattgatgaatattcagataacaatcctagttttacagatgacagcagtggtgatgaaagttcttattccaactgtgttcccatagacttgtcttgcaaacacggaactgaaaaatcagaatctgaccaacctgtttccctggataacttcactcaatccttgctaaacacttgggatccaaaagtcccagatgtagatatcaaagaagatcaagatacctcaaagaattctaagctaaactcacaccagaaagtaacacttcttcaattgctacttggccataagaatgaagaaaatgtagaaaaaaacaccagccctcagggagtacacaatgatgtgagcaagttcaatacacaaaattatgcaaggacttctgtgatagaaagccccagtacaaatcggactactccagtgagcactccacctttacttacatcaagcaaagcagggtctcccatcaatctctctcaacactctctggtcatcaaatggaattccccaccatatgtctgcagtactcagtctgaaaagctaacaaatactgcatctaaccactcaatggaccttacaaaaagcaaagacccaccaggagagaaaccagcccaaaatgaaggtgcacagaactctgcaacgtttagtgccagtaagctgttacaaaatttagcacaatgtggaatgcagtcatccatgtcagtggaagagcagagacccagcaaacagctgttaactggaaacacagataaaccgataggtatgattgatagattaaatagccctttgctctcaaataaaacaaatgcagttgaagaaaataaagcatttagtagtcaaccaacaggtcctgaaccagggctttctggttctgaaatagaaaatctgcttgaaagacgtactgtcctccagttgctcctggggaacccaacaaagggaagagtgaaaaaaaaagagaaaactcccttaagagatgaaagtactcaggaacactcagagagagctttaagtgaacaaatactgatggtgaaaataaaatctgagccttgtgatgacttacaaattcctaacacaaatgtgcacttgagccatgatgctaagagtgccccattcttgggtatggctcctgctgtgcagagaagcgcacctgccttaccagtgtccgaagactttaaatcggagcctgtttcacctcaggatttttctttctccaagaatggtctgctaagtcgattgctaagacaaaatcaagatagttacctggcagatgattcagacaggagtcacagaaataatgaaatggcacttctagaatcaaagaatctttgcatggtccctaagaaaaggaagctttatactgagccattagaaaatccatttaaaaagatgaaaaacaacattgttgatgctgcaaacaatcacagtgccccagaagtactgtatgggtccttgcttaaccaggaagagctgaaatttagcagaaatgatcttgaatttaaatatcctgctggtcatggctcagccagcgaaagtgaacacaggagttgggccagagagagcaaaagctttaatgttctgaaacagctgcttctctcagaaaactgtgtgcgagatttgtccccgcacagaagtaactctgtggctgacagtaaaaagaaaggacacaaaaataatgtgaccaacagcaaacctgaatttagcatttcttctttaaatggactgatgtacagttccactcagcccagcagttgcatggataacaggacattttcatacccaggtgtagtaaaaactcctgtgagtcctactttccctgagcacttgggctgtgcagggtctagaccagaatctgggcttttgaatgggtgttccatgcccagtgagaaaggacccattaagtgggttatcactgatgcggagaagaatgagtatgaaaaagactctccaagattgaccaaaaccaacccaatactatattacatgcttcaaaaaggaggcaattctgttgccagtcgagaaacacaagacaaggacatttggagggaggcttcatctgctgaaagtgtctcacaggtcacagccaaagaagagttacttcctactgcagaaacgaaagcttctttctttaatttaagaagcccttacaatagccatatgggaaataatgcttctcgcccacacagcgcaaatggagaagtttatggacttctgggaagcgtgctaacgataaagaaagaatcagaataaaatgtacctgccatccagttttggatctttttaaaactaatgagtatgaacttgagatctgtataaataagagcatgatttgaaaaaagcatggtataattgaaacttttttcattttgaaaagtattggttactggtgatgttgaaatatgcatactaatttttgcttaacattagatgtcatgaggaaactactgaactagcaattggttgtttaacacttctgtatgcgtcagataacaactgtgagtagcctatgaatgaaattcttttataaatattaggcataaattaaaatgtaaaactccattcatagtggattaatgcattttgctgcctttattagggtactttattttgcttttcagaagtcagcctacataacacatttttaaagtctaaactgttaaacaactctttaaaggataattatccaataaaaaaaaacctagtgctgattcacagcttattatccaattcaaaaataaattagaaaaatatatgcttacatttttcacttttgctaaaaagaaaaaaaaaggtgtttatttttaactcttggaagaggttttgtggttcccaatgtgtctgtcccaccctgagccttttcaatatatatttctttaaaccttgtgctacttagtaaaaattgattacaattgagggaagtttgatagatcctttaaaaaaaaggcagatttccattttttgtattttaactactttactaaattaatactcctccttttacaaattagaaaagttaacatttatctttaggtggtttcctgaaaagttgaatatttaagaaattgtttttaacagaagcaaaatggcttttctttggacagttttcaccatctcttgtaaaagttaattctcaccattcctgtggtacctgcgagtgttatgaccaggattccttaaacctgaactcagaccacttgcattagaaccatctggagcacttgttttaaaatgcagattcataggcagcatctcagatctacagaacaagaatctctgctaagtggacctggaatcttccatctgcatcttaacatgctctctaggtgtttcttgtgtttgagaaccatgacttatgactttcctcagaacatgagactgtaaaacaaaaacaaaaaactatgtgatgcctctattttccccaatacagtcacacatcagctcaaaatttgcaatattgtagttatatattaccgttatatctttggaaatccgggttcagaacactttttatgacaaaaattgggtggaggggataactttcatatctggctcaacatctcaggaaaatctgtgattatttgtgtgttctaatgagtaacatctacttagttagccttagggatggaaaaacagggccacttaccaaactcaggtgattccaggatggtttggaaacttctcctgaatgcatccttaacctttattaaaaccattgtcctaagaacaatgccaacaaagcttacaacatttagtttaaacccaagaaggacactaaactagattgactaataaaagtacaaggcacatatacgtgacagaattggtactcaatcactccattggatcttttactttaaagtagtgatgaaaagtacatgttgatactgtcttagaagaaattaatatattagtgaagccacatggggtttcagttgcgaaacaggtctgtttttatgttcagtttgtacaatccacaattcattcaccagatattttgttcttaattgtgttccaggttagcaaatgacctatcaaaaattattctataatcactactagttaggatattgatttaaaattgttctacttgaagtggtttctaagatttttatatttaaaaataggtgtgatttcctaatatgatctaaaaccctaaatggttatttttcctcagaatgatttgtaaatagctactggaaatattatacagtaataggagtgggtattatgcaacatcatggagagtgaaggcataggcttattctgacataaaattccactggccagttgaatatattctattccatgtccatactctgacaatcttattgtcaacactatataaataagcttttaaacaagtcatttttcttgatcgttgtggaaggtttggagccttagaggtatgtcagaaaaaatatgttggtattctcccttgggtagggggaaatgacctttttacaagagagatgaaatttaggtcagggaaaagaccaagggccagcatgctacttttgtgtgtgtgtgtgtgggttttgttttgttttttttggttggctggttgttttcattattattaacaaaggaatgagaatatgtaatacttaaataaacatgaccacgaagaatgctgttctgatttactagagaatgttcccaatttgaatttagggtgattttaaagaacagtgagaaagggcatacatccacagattcactttgtttatgcatatgtagatacaaggatgcacatatacacattttcaaggactattttagatatctagacaatttcttctaataaagtcatttgtgaaagggtactacagcttattgacatcagtaaggtagcattcattacctgtttattctctgctgcatcttacagaagagtaaactggtgagagtatatattttatatatatatatatatataatatgtatatatatatatattgacttgttacatgaagatgttaaaatcggtttttaaaggtgatgtaaatagtgatttccttaatgaaaaatacatattttgtattgttctaatgcaacagaaaagccttttaatctctttggttcctgtatattccatgtataagtgtaaatataatcagacaggtttaaaagttgtgcatgtatgtatacagttgcaagtctggacaaatgtatagaataaaccttttatttaagttgtgattacctgctgcatgaaaagtggcatgggggaccctgtgcatctgtgcatttggcaaaatgtcttaacaaatcagatcagatgttcatcctaacatgacagtattccatttctggacatgacgtctgtggtttaagctttgtgaaagaatgtgctttgattcgaagggtcttaaagaatttttttaatcgtcaaccacttttaaacataaagaattcacacaactactttcatgaattttttaatcccattgcaaacattattccaagagtatcccagtattagcaatactggaatataggcacattaccattcatagtaagaattctggtgtttacacaaccaaatttgatgcgatctgctcagtaatataatttgccatttttattagaaatttaatttcttcatgtgatgtcatgaaactgtacatactgcagtgtgaatttttttgttttgttttttaatcttttagtgtttacttcctgcagtgaatttgaataaatgagaaaaaatgcaaaaaaaaaaaaaaaaaaaaa

SEQ ID NO: 176 - DNA, 1887 bp, Homo sapiens
  misc_feature (258)..(258): n is a, c, g, or t
catcaccgcgcggccgcgcagcggacaccgtgcgtaccggcctgcggcgcccggccaccggtgagtccccggcccgagcccaggagcgcctctgacccgctgcgccgcgcggcctgccgcccccgcccccgcccccacgcggatcttgcgcatccgagcgtggccgcctcgggggcggaccgcggaacccgaggccatgtcccatgaaaagagttttttggtgtctggggacaactatcctccccccaaccctggatnatccgggggggccccagccacccatgcccccctatgctcagcctccctaccctggggccccttacccacagccccctttccagccctccccctacggtcagccagggtacccccatggccccagcccctacccccaagggggctacccacagggtccctacccccaagggggctacccacagggcccctacccacaagagggctacccacagggcccctacccccaagggggctacccccaggggccatatccccagagccccttcccccccaacccctatggacagccacaggtcttcccaggacaagaccctgactcaccccagcatggaaactaccaggaggagggtcccccatcctactatgacaaccaggacttccctgccaccaactgggatgacaagagcatccgacaggccttcatccgcaaggtgttcctagtgctgaccttgcagctgtcggtgaccctgtccacggtgtctgtgttcacttttgttgcggaggtgaagggctttgtccgggagaatgtctggacctactatgtctcctatgctgtcttcttcatctctctcatcgtcctcagctgttgtggggacttccggcgaaagcacccctggaaccttgttgcactgtcggtcctgaccgccagcctgtcgtacatggtggggatgatcgccagcttctacaacaccgaggcagtcatcatggccgtgggcatcaccacagccgtctgcttcaccgtcgtcatcttctccatgcagacccgctacgacttcacctcatgcatgggcgtgctcctggtgagcatggtggtgctcttcatcttcgccattctctgcatcttcatccggaaccgcatcctggagatcgtgtacgcctcactgggcgctctgctcttcacctgcttcctcgcagtggacacccagctgctactggggaacaagcagctgtccctgagcccagaagagtatgtgtttgctgcgctgaacctgtacacagacatcatcaacatcttcctgtacatcctcaccatcattggccgcgccaaggagtagccgagctccagctcgctgtgcccgctcaggtggcacggctggcctggaccctgcccctggcacggcagtgccagctgtacttcccctctctcttgtccccaggcacagcctagggaaaaggatgcctctctccaaccctcctgtatgtacactgcagatacttccatttggacccgctgtggccacagcatggcccctttagtcctcccgcccccgccaaggggcaccaaggccacgtttccgtgccacctcctgtctactcattgttgcatgagccctgtctgccagcccaccccagggactgggggcagcaccaggtcccggggagagggattgagccaagaggtgagggtgcacgtcttccctcctgtcccagctccccagcctggcgtagagcacccctcccctcccccccacccccctggagtgctgccctctggggacatgcggagtgggggtcttatccctgtgctgagccctgagggcagagaggatggcatgtttcaggggagggggaagccttcctctcaatttgttgtcagtgaaattccaataaatgggatttgctctctgc

SEQ ID NO: 177 - DNA, 2423 bp, Homo sapiens
ccggcccggtcgacccgccgccgccgagcatggacgaccccgactgcgactccacctgggaggaggacgaggaggatgcggaggacgcggaggacgaggactgcgaggaggccgaggccgccggcgcgagggacgcggacgcaggggacgaggacgaggagtcggaggagccgcgggggccgtgcccagctcgttccagtccagaatgacagggtccagaaactggcgagccacgagggacatgtgtaggtatcggcacaactatccggatctggtggaacgagactgcaatggggacacgccaaacctgagtttctacagaaatgagatccgcttcctgcccaacggctgtttcattgaggacattcttcagaactggacagacaactatgacctccttgaggacaatcactcctacatccagtggctgtttcctctgcgagaaccaggagtgaactggcatgccaagcccctcacgctcagggaggtcgaggtgtttaaaagctcccaggagatccaggagcggcttgtccgggcctacgcagctcatgctgggcttctacgggatccggctggaggaccgaggcacgggcacggtgggccgagcacagaactaccagaagcgcttccagaacctgaactgcgcagccacaacaacctccgcatcacacgcatcctcaagtcgctgggtgagctgggcctcgagcacttccaggcgccgctggtccgcttcttcctggaggagagcctggtgcggcgggagctgccgggggtgcggcagagtgccctggactacttcatgttcgccgtcggctgccgacaccagcgccgccagctggtgcacttcgcctgggagcacttccggccccgctgcaagttcgtctgggggccccaagacaagctgcggaggttcaagcccagctctctgccgcatccgctcgagggctccaggaaggtggaggaggaaggaagccccggggaccccgaccacgaggccagcacccagggtcggacctgtgggccagagcatagcaagggtgggggcagggtggacgaggggccccagccacggagcgtggagccccaggatgcgggacccctggagaggagccagggggatgaggcagggggccacggggaagataggccggagcccttaagccccaaagagagcaagaagaggaagctggagctgagccggcgggagcagccgcccacagagccaggccctcagagtgcctcagaggtggagaagatcgctctgaatttggaggggtgtgccctcagccagggcagcctcaggacggggacccaggaagtgggcggtcaggaccctggggaggcagtgcagccctgccgccaacccctgggagccagggtggccgacaaggtgaggaagcggaggaaggtggatgagggtgctggggacagtgctgcggtggccagtggtggtgcccagaccttggcccttgccgggtcccctgccccatcggggcaccccaaggctggacacagtgagaacggggttgaggaggacacagaaggtcgaacggggcccaaagaaggtacccctgggagcccatcggagaccccaggccccagcccagcaggacctgcaggggacgagccggccgagagcccatcggagaccccaggcccccgcccagcaggacctgcaggggacgagccagccgagagcccatcggagaccccaggcccccgcccggcaggacctgcaggggacgagccagccaagaccccatcggagaccccaggccccagcccggcaggacctacaagggatgagccagccgagagcccatcggagaccccaggcccccgcccggcaggacctgcaggggacgagccagccgagagcccatcggagaccccaggcccccgcccggcaggacctgcaggggacgagccagccgagagcccatcggagaccccaggccccagcccggcaggacctacaagggatgagccagccaaggcgggggaggcagcagagttgcaggacgcagaggtggagtcttctgccaagtctgggaagccttaaggaaaggagtgcccgtcggcgtcttggtcctcctgtccctgctgcaggggctggggcctccggagctgctgcgggctcccctcaggctctgcttcgtgacccgtgacccatgacccacagtgctggcctcctgtggggccactatagcagccaccagaagccgcgaggccctcagggaagcccaaggcctgcagaagcctcctggcctggctgtgtcttccccacccagctctcccctgcgcccctgtctttgtaaattgacccttctggagtggggggcggcgggcagggctgcttttcttagtctgatgccaagcaaggccttttctgaataaattcatttgactttgaaaaaaaaaaa

SEQ ID NO: 178 - DNA, 3270 bp, Homo sapiens
ggccgcgggcaccagagtgccgagcccaggacgcccccggcccaggcccttggggtggacaagtccttcacttctcgccggagtgtgtggaggagcgatgggcagaaccagcacttccctcaggcactagacctgtcacgagtgaacttagttccctcctatactccttcactctaccctaagaacacagatctatttgagatgattgagaagatgcagggaagcaggatggatgaacaacgctgctccttcccgccgcccctcaaaacagaggaggactacattccatacccgagcgtgcacgaggtcttggggcgagaaggacccttccccctcatcctgctgccccagtttgggggctactggattgagggcaccaaccacgaaatcaccagcatccccgagacagagccactgcagtcgcccacaaccaaggtgaagctcgagtgcaaccccacagcccgcatctaccggaagcactttctcggcaaggagcatttcaattactactcactggacactgccctcggccaccttgtcttctcactcaagtacgatgtcatcggggaccaagagcacctgcggctgctgctcaggaccaagtgccggacataccatgatgtcatccccatctcctgcctcaccgagttccctaatgttgtccagatggcaaagttggtgtgtgaagacgtcaatgtggatcggttctatcctgtgctctaccccaaggcttcccggctcatcgtcacctttgacgagcatgtcatcagcaataacttcaagtttggcgtcatttatcagaagcttgggcagacctccgaggaagaactcttcagcaccaatgaggaaagtcccgctttcgtggagttccttgaatttcttggccagaaggtcaaactgcaggactttaaggggttccgaggaggcctggacgtgacccacgggcagacggggaccgaatctgtgtactgcaacttccgcaacaaggagatcatgtttcacgtgtccaccaagctgccatacacggaaggggacgcccagcagttgcagcggaagcggcacatcgggaacgacatcgtggctgtggtcttccaggatgaaaacactcctttcgtgcccgacatgatcgcgtccaacttcctgcatgcctacgtcgtggtgcaggctgagggcgggggccctgatggccccctctacaaggtctctgtcactgcaagagatgatgtgcccttctttggaccccccctcccggaccccgctgtgttcaggaaggggcctgagttccaggaatttttgctgacaaagctgatcaatgctgaatatgcctgctacaaggcagagaagtttgccaaactggaggagcggacgcgggccgccctcctggagacgctctatgaggaactacacatccacagccagtccatgatgggcttgggcggcgacgaggacaagatggagaatggcagtgggggcggcggcttctttgagtctttcaagcgggtcatccggagccgcagccagtccatggatgccatggggctgagcaacaagaagcccaacaccgtgtccaccagccacagcgggagcttcgcgcccaacaaccccgacctggccaaggcggctggaatatcactgattgtccctgggaagagccccacgaggaagaagtcgggcccgttcggctcccgccgcagcagcgccattggcatcgagaacatacaggaggtgcaggagaagagggagagccctccggctggtcagaagaccccagacagcgggcacgtctcacaggagcccaagtcggagaactcatccactcagagctccccagagatgcccacgaccaagaacagagcggagaccgcagcgcagagagcagaggcgctcaaggacttctcccgctcctcgtccagtgccagcagcttcgccagcgtggtggaggagacggagggtgtggacggagaggacacaggcctggagagcgtgtcatcctcaggaacaccccacaagcgggactccttcatctatagcacgtggctggaggacagtgtcagcaccactagtgggggcagctccccaggcccctctcgatcaccccacccagacgccggcaagttgggggaccctgcgtgtcccgagatcaagatccagctggaagcatctgagcagcacatgccccagctgggctgttagccgggccaccccctctgaaggtgaaactgagcagatgaggccacagaagcacaaggggaaggtgccgtgtcaagcccaggcagacgagacctctgccctgaagaccaacaccagcccgtgggctgccccctgcctccccaccctccccatggcccacccatctgggctgtctctgcagggcagagccgtccagacctgggatcagggaagctgctggcatcgtccccacccccagcctgggggtctgcgctggggcagggattgctcagtggaagcaggactgggggtctggcttgccccctccctgggcctccatcacccctgagcatccctctggactcagagggaacaaggtgggagagagagtttgagacagctccgtgtggagagcttagcccctggaggcagcacaaggaggatgtgatatgtgggggagtgagcactgggttgggagccgggtcctggtttccaatttgggttctgctgtgtgactctgggcaagtcactctccctctctgggcatgtctgctacaaatggacaagattatttcagaggtcactgaagactgtgattacatgcacctgccttagaaggtaggattttcttcccagggacctcctatcaccctaccctgcttcttgaggtccctggagccccaggtgggctgaggggcagggagccggctgtgcccagtatgcctcctggaccctccagttctgccacaggtctgccgatgccctgtccactgcctacacatgacagacaagtaaccccctcatgggggatggggacctacctggctcctcagccagcacccagcttaacccctgccatcccatgctgggccctccaggccaagagtctcagctggccgagagtccaggccttgcctcccccgaccgccatggagggggcagcccggcacagctgctgggagcccttgtgtgtctggtcacactttttaggcgtcacgccaaaggccagcctcctggccccaatacccattttggaagcccctgtggccgtgtggatgtcggtaacagttgtataaaataaattctatttatcgctattgt

SEQ ID NO: 179 - DNA, 1079 bp, Homo sapiens
ccatgagccctctgctccgccgcctgctgctcgccgcactcctgcagctggcccccgcccaggcccctgtctcccagcctgatgcccctggccaccagaggaaagtggtgtcatggatagatgtgtatactcgcgctacctgccagccccgggaggtggtggtgcccttgactgtggagctcatgggcaccgtggccaaacagctggtgcccagctgcgtgactgtgcagcgctgtggtggctgctgccctgacgatggcctggagtgtgtgcccactgggcagcaccaagtccggatgcagatcctcatgatccggtacccgagcagtcagctgggggagatgtccctggaagaacacagccagtgtgaatgcagacctaaaaaaaaggacagtgctgtgaagccagacagggctgccactccccaccaccgtccccagccccgttctgttccgggctgggactctgcccccggagcaccctccccagctgacatcacccatcccactccagccccaggcccctctgcccacgctgcacccagcaccaccagcgccctgacccccggacctgccgctgccgctgccgacgccgcagcttcctccgttgccaagggcggggcttagagctcaacccagacacctgcaggtgccggaagctgcgaaggtgacacatggcttttcagactcagcagggtgacttgcctcagaggctatatcccagtgggggaacaaaggggagcctggtaaaaaacagccaagcccccaagacctcagcccaggcagaagctgctctaggacctgggcctctcagagggctcttctgccatcccttgtctccctgaggccatcatcaaacaggacagagttggaagaggagactgggaggcagcaagaggggtcacataccagctcaggggagaatggagtactgtctcagtttctaaccactctgtgcaagtaagcatcttacaactggctcttcctcccctcactaagaagacccaaacctctgcataatgggatttgggctttggtacaagaactgtgacccccaaccctgataaaagagatggaagg

SEQ ID NO: 180 - DNA, 2627 bp, Homo sapiens
gctgacgccttcgagcgcggcccggggcccggagcggccggagcagcccgggtcctgaccccggcccggctcccgctccgggctctgccggcgggcgggcgagcgcggcgcggtccgggccggggggatgtctcggcggacgcgctgcgaggatctggatgagctgcactaccaggacacagattcagatgtgccggagcagagggatagcaagtgcaaggtcaaatggacccatgaggaggacgagcagctgagggccctggtgaggcagtttggacagcaggactggaagttcctggccagccacttccctaaccgcactgaccagcaatgccagtacaggtggctgagagttttgaatccagaccttgtcaaggggccatggaccaaagaggaagaccaaaaagtcatcgagctggttaagaagtatggcacaaagcagtggacactgattgccaagcacctgaagggccggctggggaagcagtgccgtgaacgctggcacaaccacctcaaccctgaggtgaagaagtcttgctggaccgaggaggaggaccgcatcatctgcgaggcccacaaggtgctgggcaaccgctgggccgagatcgccaagatgttgccagggaggacagacaatgctgtgaagaatcactggaactctaccatcaaaaggaaggtggacacaggaggcttcttgagcgagtccaaagactgcaagcccccagtgtacttgctgctggagctcgaggacaaggacggcctccagagtgcccagcccacggaaggccagggaagtcttctgaccaactggccctccgtccctcctaccataaaggaggaggaaaacagtgaggaggaacttgcagcagccaccacatcgaaggaacaggagcccatcggtacagatctggacgcagtgcgaacaccagagcccttggaggaattcccgaagcgtgaggaccaggaaggctccccaccagaaacgagcctgccttacaagtgggtggtggaggcagctaacctcctcatccccgctgtgggttctagcctctctgaagccctggacttgatcgagtcggaccctgatgcttggtgtgacctgagtaaatttgacctccctgaggaaccatctgcagaggacagtatcaacaacagcctagtgcagctgcaagcgtcacatcagcagcaagtcctgccaccccgccagccttccgccctggtgcccagtgtgaccgagtaccgcctggatggccacaccatctcagacctgagccggagcagccggggcgagctgatccccatctcccccagcactgaagtcgggggctctggcattggcacaccgccctctgtgctcaagcggcagaggaagaggcgtgtggctctgtcccctgtcactgagaatagcaccagtctgtccttcctggattcctgtaacagcctcacgcccaagagcacacctgttaagaccctgcccttctcgccctcccagtttctgaacttctggaacaaacaggacacattggagctggagagcccctcgctgacatccaccccagtgtgcagccagaaggtggtggtcaccacaccactgcaccgggacaagacacccctgcaccagaaacatgctgcgtttgtaaccccagatcagaagtactccatggacaacactccccacacgccaaccccgttcaagaacgccctggagaagtacggacccctgaagcccctgccacagaccccgcacctggaggaggacttgaaggaggtgctgcgttctgaggctggcatcgaactcatcatcgaggacgacatcaggcccgagaagcagaagaggaagcctgggctgcggcggagccccatcaagaaagtccggaagtctctggctcttgacattgtggatgaggatgtgaagctgatgatgtccacactgcccaagtctctatccttgccgacaactgccccttcaaactcttccagcctcaccctgtcaggtatcaaagaagacaacagcttgctcaaccagggcttcttgcaggccaagcccgagaaggcagcagtggcccagaagccccgaagccacttcacgacacctgcccctatgtccagtgcctggaagacggtggcctgcggggggaccagggaccagcttttcatgcaggagaaagcccggcagctcctgggccgcctgaagcccagccacacatctcggaccctcatcttgtcctgaggtgttgagggtgtcacgagcccattctcatgtttacaggggttgtgggggcagagggggtctgtgaatctgagagtcattcaggtgacctcctgcagggagccttctgccaccagcccctccccagactctcaggtggaggcaacagggccatgtgctgccctgttgccgagcccagctgtgggcggctcctggtgctaacaacaaagttccacttccaggtctgcctggttccctccccaaggccacagggagctccgtcagcttctcccaagcccacgtcaggcctggcctcatctcagaccctgcttaggatgggggatgtggccaggggtgctcctgtgctcaccctctcttggtgcatttttttggaagaataaaattgcctctctctttg

SEQ ID NO: 181 - DNA, 7176 bp, Homo sapiens
gcggatggacagcaggccccgcgccgggtgctgcgagtggctgagatgctgcggtggaggggaggccaggccccgcactgtctggctggggcaccccgagaagagagaccagaggtatcctcggaatgtcatcaacaatcagaagtacaatttcttcacctttcttcctggggtgctgttcaaccagttcaaatactttttcaacctctatttcttacttcttgcctgctctcagtttgttcccgaaatgagacttggtgcactctatacctactgggttcccctgggcttcgtgctggccgtcactgtcatccgtgaggcggtggaggagatccgatgctacgtgcgggacaaggaagtcaactcccaggtctacagccggctcacagcacgaggtactgttgtgggtgttgttctttacactggcagagaactccggagtgtcatgaatacctcaaatccccgaagtaagatcggcctgttcgacttggaagtgaactgcctcaccaagatcctctttggtgccctggtggtggtctcgctggtcatggttgcccttcagcactttgcaggccgttggtacctgcagatcatccgcttcctcctcttgttttccaacatcatccccattagtttgcgcgtgaacctggacatgggcaagatcgtgtacagctgggtgattcgaagggactcaaaaatccccgggaccgtggttcgctccagcacgattcctgagcagctgggcaggatttcgtacttactcacagacaagacaggcactcttacccagaacgagatgattttcaaacggctccatctcggaacagtagcctacggcctcgactcaatggacgaagtacaaagccacattttcagcatttacacccagcaatcccaggacccaccggctcagaagggcccaacgctcaccactaaggtccggcggaccatgagcagccgcgtgcacgaagccgtgaaggccatcgcgctctgccacaacgtgactcccgtgtatgagtccaacggtgtgactgatcaggctgaggccgagaagcagtacgaagactcctgccgcgtataccaggcatccagccccgatgaggtggccctggtacagtggacggaaagtgtgggcttaaccctggtgggccgagaccagtcttccatgcagctgaggacccctggcgaccagatcctgaacttcaccatcctacagatcttccctttcacctatgaaagcaaacgtatgggcatcatcgtgcgggatgaatcaactggagaaattacgttttacatgaagggagcagatgtggtcatggctggcattgtgcagtacaatgactggttggaggaagagtgtggcaacatggcccgagaagggctgcgggtgctcgtggtggcaaagaagtctcttgcagaggagcagtatcaggactttgaagcccgctacgtccaggccaagctgagtgtgcacgaccgctccctcaaagtggccacggtgatcgagagcctggagatggagatggaactgctgtgcctgacgggcgtggaggaccagctgcaggcagatgtgcggcccacgctggagaccctgaggaatgctggcatcaaggtttggatgctgacaggggacaagctggagacagctacgtgcacagcgaagaatgcacatctggtgaccagaaaccaagacatccacgtttttcggctggtgaccaaccgcggggaggctcacctcgagctgaacgccttccgcaggaagcatgattgtgccctggtcatctcgggagactccctggaggtttgcctcaagtactatgagtacgagttcatggagctggcctgccagtgcccggccgtagtctgctgccgatgtgcccccacccagaaggcccagatcgtgcgcctgcttcaggagcgcacgggcaagctcacctgtgcagtaggggacggaggcaatgacgtcagcatgattcaggaatctgactgcggcgtgggagtggaaggaaaggaaggaaaacaggcttcgttggctgcagacttctccatcactcaatttaagcatcttggccggttgcttatggtgcatggccggaacagctacaagcggtcagccgccctcagccagttcgtgattcacaggagcctctgtatcagcaccatgcaggctgtcttttcctccgtgttttactttgcctccgtccctctctatcaaggattcctcatcattgggtactccacaatttacaccatgtttcctgtgttttctctggtcctggacaaagatgtcaaatcggaagttgccatgctgtatcctgagctctacaaggatcttctcaagggacggccgttgtcctacaagacattcttaatatgggttttgattagcatctatcaagggagcaccatcatgtacggggcgctgctgctgtttgagtcggagttcgtgcacatcgtggccatctccttcacctcgctgatcctcaccgagctgctcatggtggcgctgaccatccagacctggcactggctcatgacagtggcggagctgctcagcctggcctgctacatcgcctccctggtgttcttacacgagttcatcgatgtgtacttcatcgccaccttgtcattcttgtggaaagtctccgtcatcactctggtcagctgcctccccctctatgtcctcaagtacctgcgaagacggttctctccccccagctactcaaagctcacatcataggccgtgcgttcgctggagggggccctggtcttggcgcttccctgatggacagagctcaagttccatttatattaaccgccacctgtggattttgcagtaattgctaacacatgcagttttaatgggaagcggctctgcgcctaaacggagtcctaacgctgcatcaacgggagggagggtcctgaaagagacccatctgggcctgtctgaacccctcgttcttcatgtttaggtgaatatgaatatgttaaagctggtggctcagctgggagatttatatgggtcactgtgcgagcttccttatgacttgaattttgttgtcacatgataaaagtttctgtgtagctgaaggttgtagaaggcttgtgtgtgtgtgtgtgtgtgtgtgtgtgtgtgtgtgtgtgtttttaaagagtcctaatgtgtatgtactctttatgtctttcttgctcttacaaagaggtgtcagaaaaatagaaagctcttggtgtcggtttgggaggaaaagacagtgacatttggtaaaaagttatccacacaataatctccattcggaaatgctcagtatcgtctccagccagccctgcttatccaggttacactggattcctgggatcgtaaccagtaaatgagaggagagggagagagagtgtcctaagtccaatctgttatccttgatctgattcagcatccatagtgtgtgagttaacttcacctgccacctcgtaaaagaatttcagaggtgtgatcccgctttattgggacctggtaacaatcacaaagccagtggctgtttgagaaggacctcagacattttcagcagagttgttttagcaggaaacgtgccactgaatggcccctaaatgtgtcgacagtgtgataagagactcaactaattctttaggcaacatggcagatgtgactcagatcctccaagaccaaagcggaaaggtcagggggctgggactcttctcttccatagaagcctgtttcctgttaggaggcataatggaagatgaccccacaaaggcagaggcatctttcggaacaacactggtggcagctttcagaacaaggaacccctggtgggaggacgcccaagctacagcgttgggatctgggatctgttccactgccggcagatttcaaggggaacttgctgaaaggcagccagtggtgaagatttctcccctcccaggatggactacatgccggcatgtttcttataaagctgtggctgcttgtttcagaggaagggagtttgcagtcgcgggacgtggtagagcaaggcattcttgggttttcaagttgcttcttgcagaagccacatatgcatgccataagggttaagttggtggatctttaagagccaagtgtggttgagatcttggatttgcgtttacttcttgatgaatacatatccttcaaaccctctgcctggcgctacttctgtgtgcttcagagaggtacatcacagcctggtttctgatgcctactaactcctgctcttggagagctggagacacgaggatcagatagtcccttgcctttggagcactcttgataagcttttgtattttgtgttgtccttttaaaatgttctagaatgactttacgttgcaggtactggttaattggctgttgacaccacatctattttgtcttatgattctgcagttttgcagtacttttctctatctgattcagccatttctgccagagggaaaaggtcggcagaaaagatgtattgagtgaatagttaaggataggatctttgtccaaaaatttcagaaagattgagcaaatctgacgtattcattgagtgagtttctgtgttttcaaaggtggaggagaaatttgtgctggaagtttttaagcctccgttttcttggaaatcagtctgtaacactggcaagtcttaagatagtcccgtttagactttgcagatgctgaacctggctctgtaacgctgggaagtcttaagatagtcctgtttagactttgcaaaccctgtacctggctttgctcggagattcgggatgctggctcctgcaggcagggcgtgtgggagcctcgtcagaaagttttagaggtttccagcagaagcagaatgaagatggtctccctggccttttccttaattctcaattttgattgaggtgcacaagttgacttttaaagccaacgcttaagatactgattgacatcttcaagggagaatgctcccaggaggggctgaagaagccatagttggaagtggaaggtactcgtcagtgttctccacaaacctttttactctgttgtctcagccgcactggggcggaggcggtcaagggtgagaagtaccgacactcaagtgcaaactgccacgtcgttggcccatcccatcagtgggcagctggctgacgccattcactggacggtccctgaacacctaggaatgcacacaccgtgcttctcagacactggagacgcaaaggcaggaggatgcagtccggtgagaggacacgatctttacctgcacaatcagactgtaagcccagcagagaaccccaggggcgcctgggtacttctcggaggtcatcttagttgtggtggggaagacaaagaaataagcaaacaagaaactagagttactatacaagaaactctcctgagtttgtaaaccttaagcataaggattcagttgacctttttcttggttcatcaatctggaaagaacttacataaagcgccattgacactgtcacctgggagctccatgggccgtaagtctttgacagccaatttaatttgaggtcagagggccttgaggtacacagtcagcactgtttgaacacttttcctgaaagcaaaactcacagctccctgcgccctctgacaacactagctatttctgccagagtaagaacttctattactattttattattgttcatatgtcttttgatgatggttgtgtgacagggggaagcaggatctatttggtttcttccccctccccccaccccttcctttttgtctctctttttttttctctaagaaaatcaccagactagtttttccatcttgagtaatttcttatgtgggacagttttgatcctcattttgaaagcatgcgtgcgcacatgtgtgttgcctgtggtgccaggtgagacaggtggcactaactccagctgcttggaaggcatcccaagggcgcatcttaaagttggagcagacctcccttttccagcccctggggccattagaccacgtgctggaactagcattgtaaaattcccatcccagttccactcccctgaagtgaaacccttttttttttgtgacagtaaatcttaaaaatcattgtctctttatgaacatttcctcagtttcttctctgctgaaaatgtaagccatgctactttttaatgtattttgaattttgtgctcattggaaattgatatgctaatgcctcccccaccccccgccagacttttctttttatactttgtcttgtttttactggggtaggctgggcatgcgtgcgtgcctttagggcagcattttaaacctttgccaaaattgcaaatgggacatgtacattcttctgctccatcctacttaaacacctatcagctatttttatctttaaccttttctgtatgtttgaagtgtgtggggggtgtgtgtgtgtgtgaaagagcgagagaatgatgtcatctaaagttttttgaagaattatttggttttcattgcattaaaattctatcactcccagctttgttttcatttaaaaaaatatacaaagagctttgtaaatacaacacattttatttctcccccttcttttaatgtacagcttttttgccacttatatatacttaaaatattcccatgaattatgtccagttcttcttggaaaaaaatttggttttgaatgaacctgcaaagcatcctgcagcgtgagcagctcctccacctggagctccgaagcatcttctcaggccaaagcggcattacccgtgaatctgtcttctccgccacagcatggtttgaggcgcagtctgttaatatagctgggccatgtcagtgactgttgtgtttgtggggtcaggtggggggcatggtatttgcaaaaaaaacaaattatggctaatttattattttgttgcagtggggttaactgtaaactcatgtaagagtctgtgatttcctcattggttgatctctctctctgtaatcctcattgcaaattttcaccaggacagcgttttttgattagaggggagctctggcacagtatgctttaatttagcaggaacttccagatgatttaaattctcgatgctgtgatgacacacatatgatctttcgtgtttctgagcgactctactttcattgtttgccagcgtggctcgttgctgttgcccaataaagcttgtgtacgttc

SEQ ID NO: 182 - DNA, 3981 bp, Homo sapiens
tcggagtgccgcccgcggccccgagtcggtctcgagccgccggccggccgtgccggtgtccgtaggcgctgcgccctcggccgggcccatgtgtgtgcggcccgcccgaggccgcccgggctttgcctccaccagcgccctggcctccgctcgggcctccacacgggcctccgaagagctgccgcgacgcccggcccgcagggcaggtaaagagattataaatcttccactgaatgaaaaaaattttcttaaagctgcatatactccaagaaaaaaaccacaaatgtttttctgttttgcctgaatacatgatttaaacaagagatttccacagaagctctgcggccgtcacgatgttctggaagtttgacttgaacaccacgtcccatgttgacaagctgctggacaaggagcatgtgacgctgcaggagttaatggatgaagatgacatcttgcaggagtgtaaggctcagaaccagaagctgctggacttcctgtgcaggcagcagtgcatggaggagctggtgagcctcatcacacaggatccgcccctggacatggaggagaaggtccgcttcaaatatccaaacacagcctgtgagcttctgacttgtgatgtgccgcagatcagcgaccgcctcggtggggacgagagcctgctgagcctcctgtacgacttcttggaccatgagccgcctctcaatcctctgctcgccagttttttcagcaagaccattggcaatctcattgcaagaaaaaccgaacaggtgattacgtttttgaagaagaaggacaagttcatcagcctggtgttgaagcacatcggcacctcagcgcttatggacctgctgctgcgcctggtcagctgtgtggagccagccgggctccggcaggacgtcctgcactggctgaatgaagagaaggtcatccagaggcttgtggagttgatccacccgagccaggatgaagataggcagtcaaatgcttctcagactctctgtgacatagttaggctgggcagagaccagggcagtcagctgcaagaggctctggagccagacccgctcctcacagcgctggagtcgcaggactgtgtggagcagcttctgaagaacatgtttgatggagaccggacggagagctgcctcgtcagtgggactcaggtgttactcaccttgctggaaaccaggcgggttgggacagagggcttggtggactccttttctcagggactggaaaggtcatacgctgtcagcagcagcgtactacacggcatcgagcctcggctgaaggacttccaccagctcctgctcaacccgcccaagaagaaagcgatcctgaccaccattggtgtgctggaggagcccctggggaatgcccgtctgcatggcgcccgcctcatggcagcactgctgcacacaaacacacccagcatcaaccaggagctctgccggctcaacacgatggacttactgctggacttgttctttaagtacacctggaataactttttgcacttccaagtggaactatgcatagccgctattctctcccacgctgcccgtgaggagaggacagaagccagcggatccgagagcagggtggagcctccgcatgagaacgggaaccggagcctggagactccccagccggccgccagcctccctgacaacacaatggtgacccacctgttccagaagtgctgcctggtgcagaggatcctggaggcctgggaagccaacgaccacacgcaggcagcgggtggcatgagacgtgggaacatgggccacctcacacggatcgccaacgcggtggtgcagaacctggagcggggccctgtgcagacgcacatcagcgaggtcatccgagggctccctgcggactgccgtggccgctgggagagcttcgtggaggagacgctgacggagacgaaccgcaggaacactgtggacctggccttctctgactaccagatccagcagatgacagccaacttcgtggatcagtttggcttcaatgatgaggagtttgccgaccaggacgacaacatcaatgccccgtttgacaggatcgcagagatcaacttcaacatcgacgctgacgaggacagtcccagcgcagctctgtttgaggcctgctgcagtgaccgcatccagccctttgatgatgatgaggacgaggacatctgggaggacagtgacactcgctgtgctgcccgggtgatggccagacccaggtttggagccccccatgcttcagagagttgctcaaagaatggcccagagcgtggaggccaggatgggaaggcgagcttggaagcacacagagatgcacctggggcaggtgccccaccggcccccgggaagaaggaagccccccctgtggagggtgactcagaagcaggcgccatgtggacggcagtgtttgatgagccagcgaactcaacgcccacagccccaggagtggtgagggacgtgggttccagtgtgtgggcagctggcacctcagctccagaggagaaaggctgggccaagttcactgacttccaacctttctgctgctccgagtcagggcccaggtgcagctctccggtggacacagaatgcagccatgctgagggcagccggagccaaggccctgagaaagccttcagcccggcttctccatgtgcctggaacgtgtgtgtcaccaggaaggcccccctgctggcctctgacagtagctcctctgggggctcccacagcgaggatggcgaccagaaggcagcgagtgccatggatgcggtgagcaggggtcccggccgggaggcccccccgctgcccacagtggccaggacagaggaggcggtcggcagggtcgggtgtgctgacagccggctgttaagccctgcctgccccgcgccaaaggaagtgactgctgccccagccgtggctgtgccccccgaggctactgtggccatcaccacagcactgagcaaggctggccccgccatacccaccccagcagtctcttctgcactggccgtggcggtccccctagggcccatcatggcagtcacagcagccccagccatggtggccaccctggggacagtgacaaaggacggacagatgccccgccagaaggagctgccttaaatggcccagtgtgatgctgctgccgcccggccacggcccaccctggtcaggctgcctccttaatcgagaaaactacctggtgatgcaatctttttttttttaatttaatttaattttaaaataaatgctgcattggtaaagctggcagttgaaaccagttggacggcccagcttgcgtctcttctgcctgagtgggcctctcaggtcactcgtgccctgctggaggacagaggggcacctcagccgcccccaagcccagagcacagcaataaggtcggcctgcaggagccggggtgggggtggggggggcaggaccctgagatgccaccaggacctgatgggccaggaagggcgtggacatggaggctgtttttacagtttttttttgttgttgttttgtttttaaagaatacagaaggagccaagcttttttgcactttgtatccagctgcaagctcagggcagagtcaagggcctgggttggaaaaacctgactcacaggaatgcataattgacccttgcagctacccaatagcccttggagctggcactgaaccaggctgcaagatttgactgccttaaaaacacaaggccctctaggcctggcagggatgtccctgtgcccagcacagggtgcctggcagggggagaccacaggtatgcaggtggggggacatggtgtggcactgggggctcgaagactggtttctagcactaccggtcacggccatgtcgtcctagaagggtccagaagattattttacgttgagtccatttttaatgttctgatcacctgacagggcaccccaaacccccaactcccaataaaagccgtgacgttcgg

SEQ ID NO: 183 - DNA, 4160 bp, Homo sapiens
agcaagctgagctcagagcgaagctggcgagccaaggagataaagaaccctcggtggggatgcccagagggtgcatgctccacgcccctcgaaaccgattctcattgctgctgctgcaaagcaacccgaagtgcgccacctacccgactgaggctgcgcaagccccggggtctgggcggggtggtcctcgtgcgcgccgcgtcgccgtggagacgagggcgggcccgcgcgagactggcgtctagaggcgcgcgaagcgctgaggcgggcgtggaccgcgcgggagttaagaagcaggtcccggatcgccgtataccgccgggttttctcccaacgtcaggcccgatggctcggcttccccagttagaaggggaagataaaagactttgattcatgaagaatctgctcactgagaagtgtatatcaagccacaatttccatcaaaaagtgattaagcagagaatggagaagaaggttgattccaggtattttaaggatggtgcagttaagaaaccttattctgcaaagacactgtccaacaagaagtcttctgcatcctttgggatccggagggagttacctagtaccagtcatctagtgcagtatcgtggcacacatacttgtacccgacagggccggttaagagaactgcgcatcagatgcgtggccagaaagttcttatatttatggattcgaatgacttttggaagagtatttccctctaaagccagattttactatgagcagcgattactacggaaggtcttcgaagaatggaaagaggagtggtgggttttccagcacgagtggaaactctgtgttcgagctgactgtcactacaggtattacctgtacaacctgatgttccagacgtggaagacctatgtgcgtcagcagcaggagatgaggaacaagtacattagagccgaggttcatgatgcaaagcaaaagatgcgacaggcctggaagtcctggttgatctacgtggttgttcgtaggaccaaacttcagatgcagactacagctctggagtttaggcaacggattatcttacgggtgtggtggagcacgtggaggcagcgactaggacaggtccgtgtgagccgtgccctccatgcctctgctttgaagcacagggccctgagcctccaggtgcaggcttggtcacagtggcgggaacagctcctgtatgtccagaaggagaaacaaaaggttgtctctgcagtgaaacatcatcagcactggcaaaaacggagatttctaaaggcctggcttgaatacctgcaagtccgcagagtgaagagacagcagaatgagatggctgagcgattccatcatgtcactgtgctccagatacacttctgtgactggcagcaggcctgggagcggagggagagcttgtacgctcaccatgcccaggtggagaaactggccaggaagatggccctgcggcgcgcctttactcactggaaacactacatgctgctgtgtgcagaagaagctgcccagtttgagatggcagaagagcaccacaggcacagccagctgctgctgcacaggttctggaacctctggcggtctcagattgagcagaaaaaggaaagagagctgctccccttactgcatgctgcctgggaccactacagaatagcactgctgtgcaaatgtatcgaattgtggctacagtatactcagaagaggcggtacaagcagctgctacaggccagagcggatggtcatttccagcagagagccctgcctgctgccttccacacatggaacagactctggcgatggcgccaccaggaaaatgtcctcagtgcaagagcaacacgtttccacagggagacattagagaagcaagtattttctctctggaggcagaagatgtttcagcatcgagaaaaccgcctggcagagagaatggccatccttcacgcagagcgacagcttctgtataggtcttggttcatgtggcaccagcaggcagcagcacgtcaccaggagcaggagtggcaaacagtggcctgtgcccaccaccgccacgggcggctcaagaaagctttctgcctctggagggaaagtgcccaagggctcagaacagagaggacgggcagggtgcgggcagcagaattccacatggcccagctcctgcgttgggcctggagccagtggagggagtgcctggccctgcggggagcggagcggcagaagctgatgcgagcagacctgcaccaccagcacagcgtgctgcacagggcgctgcaggcatgggtgacttaccagggcagggtgcgaagcatcctccgggaggtggcagccagggagagccagcacaacaggcagctgctgcgcggggcattacgtcgctggaaagagaacaccatggcccgagtggatgaagccaaaaaaacctttcaagcaagtactcattacagaaggaccatatgttccaaggtcctggtccagtggcgggaagctgtgtcagtgcagatgtattaccgacagcaggaggactgtgccatctgggaggcccagaaggtgctggacaggggctgtctgcggacctggtttcagcgctggtgggactgcagccggaggtcagcccagcagagactgcagctggagagggcagtgcaacaccaccaccggcagctgctgctggaggggctggcccggtggaagacgcaccatctgcagtgtgtcaggaagaggctcctgcacaggcagagcacccaactgctggcacagagactcagccggacctgcttccgccagtggagacaacagctggcagccaggaggcaggagcagcgggcgacagtgcgggccctgtggttctgggccttctcgctgcaggcaaaggtgtgggccacgtggctggcctttgtactggaaaggaggagaaagaaggcgcggctgcagtgggcgctccaggcctaccaggggcagctcctccaggagggtgccacgcggctcctgcgctttgcagccagcatgaaggcctcccggcagcagctgcaggcccagcagcaggtccaggcggctcacagtctccatcgtgccgtccgccgctgtgccacgctctggaaacagaaagtgctgggccggggcgggaagcctcagcccctggcagccatcgcacccagcaggaaagtgacgtttgagggtccccttctcaaccgcattgctgctggggctggggatggcacccttgagaccaagaggccacaggcttctcggcctctgggagctctgggccgcctggctgctgaggagccccacgccctggagctcaacactgcccactcagcgaggaagcagccgcgacgcccacacttcctgttggagcctgcgcagagccagaggcctcagaagccacaggaacatggcctaggcatggctcagccagcagccccctccctgacgcggcccttcctggcagaggccccgacagcactggtcccacacagccccctgcctggggccctgtcaagcgcccctggcccgaagcagcccccgacggcaagcacaggcccggagctgctgctgctgcctccttcctccttcatgccctgcggggcggctgcaccagccagggtgtcagcacagcgggctactcctagggataagcccccggtcccctcatccctggccagtgtccctgacccccatctactccttcctggggacttctcagccaccagggctgggcctggactttcaactgcaggcagcctggaccttgaggctgaacttgaggagatccagcagcaactactgcactaccagaccaccaagcagaacctctggtcctgtcggcggcaagcgagcagcctgcgcaggtggctggagctgaacagagaggagccagggcctgaggaccaggaagtagagcagcaggtgcagaaagagctggaacaggtggaaatgcagatccagctgctggcagaggagctccaggctcagcgccagcccattggcgcctgcgttgcccgcatccaggccctgcggcaggccctgtgctagcgtgttcgcaccaggaacgcaggtgctgggctgtcggggaggcctcaggccacctccaggaacagaacacagttttaagtttgattttttttatttcaaaatgctttgcaattaaatgaattactgttcag

SEQ ID NO: 184 - DNA, 2738 bp, Homo sapiens
tatctttgtcagtgcacaaaatggcgccctacagcctactggtgactcggctgcagaaagctctgggtgtgcggcagtaccatgtggcctcagtcctgtgccaacgggccaaggtggcgatgacgcattttgagcccaacgagtacatccattatgacctgctagagaagaacattaacattgttcgcaaacgactgaaccggccgctgacactctcggagaagattgtgtatggacacctggatgaccccgccagccaggaaattgagcgaggcaagtcgtacctgcggctgcggcccgaccgtgtggccatgcaggatgcgacggcccagatggccatgctccagttcatcagcagcgggctgtccaaggtggctgtgccatccaccatccactgtgaccatctgattgaagcccaggttggggacgagaaagacctgcgccgggccaaggacatcaaccaggaagtttataatttcctggcaactgcaggtgacaagtatggcgtgggcttctggagccctggatctggaatcattcaccagattattctcgaaaactatgcgtaccctggagttcttctgattggaactgactcccacacccccaatggtggtggcctaggaggcatctgcattggagtagggggtgcagatgctgtggatgtcatggctgggatcccctgggagctgaagtgccccaaggtgattggcgtgaagctgacgggctctctctccggttggacctcacccaaagatgtgatcctgaaggtggcaggcatcctcacggtgaaaggtggcacaggtgcaatcgtggaataccacgggcctggtgtagactccatgtcctgcactggcatggcgacaatctgcaacatgggtgcagaaattggggccaccacttccgtgttcccttacaaccacaggatgaagaagtacctgagcaagaccggccgggaagacattgccaatctagctgatgaattcaaggatcacttggtgcctgaccctggctgccattatgaccaactaattgaaattaacctcagtgagctgaagccacacatcaatgggcccttcacccctgacctggctcaccctgtggcagaagtgggcaaggtggcagagaaggaaggatggcctctggacatccgagtgggtctaattggtagctgcaccaattcaagctatgaagatatggggcgctcagcagctgtggccaagcaggcactggcccatggactcaagtgcaagtcccagttcaccatcactccaggttccgagcagatccgcgccaccattgagcgggacggctatgcacagatcctgagggatctgggtggcattgtcctggccaatgcctgcgggccctgcattggccagtgggacagaaaggacatcaagaagggggagaagaacacaatcgtcacctcctacaacaggaacttcacgggccgcaacgacgcaaaccccgagacccatgcctttgtcacgtccccagagattgtcacagccctggccattgcaggaaccctcaagttcaacccagagaccgactacctgacaggcaaggatggcaagaagttcaggctggaagctccggatgcagatgagcttcccaaaggggagtttgacccagggcaggacacctaccagcaccccccaaaggacagcagcaggcagcatgtggacgtgagccccaccagccagcgcctgcagctcctggagccttttgacaagtgggatggcaaggacctggaggacctgcagatcctcatcaaggtcaaagggaagtgtaccactgaccacatctcagctgctggcccctggctcaagttccgtgggcacttggataacatctccaacaacctgctcattggtgccatcaacattgaaaacggcaaggccaactccgtgcgcaatgccgtcactcaggagtttggccccgtccctgacactgcccgctactacaagaaacatggcatcaggtgggtggtgatcggagacgagaactacggcgagggctcgagccgggagcatgcagctctggagcctcgccaccttgggggccgggccatcatcaccaagagctttgccaggatccacgagaccaacctgaagaaacagggcctgctgcctctgaccttcgctgacccggctgactacaacaagattcaccctgtggacaagctgaccattcagggcctgaaggacttcacccctggcaagcccctgaagtgcatcatcaagcaccccaacgggacccaggagaccatcctcctgaaccacaccttcaacgagacgcagattgagtggttccgcgctggcagtgccctcaacagaatgaaggaactgcaacagtgagggcagtgcctccccgcccgccgctggcgtcaagttcagctccacgtgtgccatcagtggatccgatccgtccagccatggcttcctattccaagatggtgtgaccagacatgcttcctgctccccgtagccctcggagtgactgtggttgtggtgggggggttcttaaaataactttttagcccccgtcttcctattttgagtttggttcagatcttaagcagctccatgcaactgtatttatttttgatgacaagactcccatctaaagtttttctcctgcctgatcatttcattggtggctgaaggattctagagaaccttttgttcttgcaaggaaaacaagaatccaaaaccaaaaaaaaaaaaaaaaaa

SEQ ID NO: 185 - DNA, 3541 bp, Homo sapiens
tccagtttgcttcttggagaacactggacagctgaataaatgcagtatctaaatataaaagaggactgcaatgccatggctttctgtgctaaaatgaggagctccaagaagactgaggtgaacctggaggcccctgagccaggggtggaagtgatcttctatctgtcggacagggagcccctccggctgggcagtggagagtacacagcagaggaactgtgcatcagggctgcacaggcatgccgtatctctcctctttgtcacaacctctttgccctgtatgacgagaacaccaagctctggtatgctccaaatcgcaccatcaccgttgatgacaagatgtccctccggctccactaccggatgaggttctatttcaccaattggcatggaaccaacgacaatgagcagtcagtgtggcgtcattctccaaagaagcagaaaaatggctacgagaaaaaaaagattccagatgcaacccctctccttgatgccagctcactggagtatctgtttgctcagggacagtatgatttggtgaaatgcctggctcctattcgagaccccaagaccgagcaggatggacatgatattgagaacgagtgtctagggatggctgtcctggccatctcacactatgccatgatgaagaagatgcagttgccagaactgcccaaggacatcagctacaagcgatatattccagaaacattgaataagtccatcagacagaggaaccttctcaccaggatgcggataaataatgttttcaaggatttcctaaaggaatttaacaacaagaccatttgtgacagcagcgtgtccacgcatgacctgaaggtgaaatacttggctaccttggaaactttgacaaaacattacggtgctgaaatatttgagacttccatgttactgatttcatcagaaaatgagatgaattggtttcattcgaatgacggtggaaacgttctctactacgaagtgatggtgactgggaatcttggaatccagtggaggcataaaccaaatgttgtttctgttgaaaaggaaaaaaataaactgaagcggaaaaaactggaaaataaagacaagaaggatgaggagaaaaacaagatccgggaagagtggaacaatttttcattcttccctgaaatcactcacattgtaataaaggagtctgtggtcagcattaacaagcaggacaacaagaaaatggaactgaagctctcttcccacgaggaggccttgtcctttgtgtccctggtagatggctacttccggctcacagcagatgcccatcattacctctgcaccgacgtggcccccccgttgatcgtccacaacatacagaatggctgtcatggtccaatctgtacagaatacgccatcaataaattgcggcaagaaggaagcgaggaggggatgtacgtgctgaggtggagctgcaccgactttgacaacatcctcatgaccgtcacctgctttgagaagtctgagcaggtgcagggtgcccagaagcagttcaagaactttcagatcgaggtgcagaagggccgctacagtctgcacggttcggaccgcagcttccccagcttgggagacctcatgagccacctcaagaagcagatcctgcgcacggataacatcagcttcatgctaaaacgctgctgccagcccaagccccgagaaatctccaacctgctggtggctactaagaaagcccaggagtggcagcccgtctaccccatgagccagctgagtttcgatcggatcctcaagaaggatctggtgcagggcgagcaccttgggagaggcacgagaacacacatctattctgggaccctgatggattacaaggatgacgaaggaacttctgaagagaagaagataaaagtgatcctcaaagtcttagaccccagccacagggatatttccctggccttcttcgaggcagccagcatgatgagacaggtctcccacaaacacatcgtgtacctctatggcgtctgtgtccgcgacgtggagaatatcatggtggaagagtttgtggaagggggtcctctggatctcttcatgcaccggaaaagtgatgtccttaccacaccatggaaattcaaagttgccaaacagctggccagtgccctgagctacttggaggataaagacctggtccatggaaatgtgtgtactaaaaacctcctcctggcccgtgagggaatcgacagtgagtgtggcccattcatcaagctcagtgaccccggcatccccattacggtgctgtctaggcaagaatgcattgaacgaatcccatggattgctcctgagtgtgttgaggactccaagaacctgagtgtggctgctgacaagtggagctttggaaccacgctctgggaaatctgctacaatggcgagatccccttgaaagacaagacgctgattgagaaagagagattctatgaaagccggtgcaggccagtgacaccatcatgtaaggagctggctgacctcatgacccgctgcatgaactatgaccccaatcagaggcctttcttccgagccatcatgagagacattaataagcttgaagagcagaatccagatattgtttccagaaaaaaaaaccagccaactgaagtggaccccacacattttgagaagcgcttcctaaagaggatccgtgacttgggagagggccactttgggaaggttgagctctgcaggtatgaccccgaagacaatacaggggagcaggtggctgttaaatctctgaagcctgagagtggaggtaaccacatagctgatctgaaaaaggaaatcgagatcttaaggaacctctatcatgagaacattgtgaagtacaaaggaatctgcacagaagacggaggaaatggtattaagctcatcatggaatttctgccttcgggaagccttaaggaatatcttccaaagaataagaacaaaataaacctcaaacagcagctaaaatatgccgttcagatttgtaaggggatggactatttgggttctcggcaatacgttcaccgggacttggcagcaagaaatgtccttgttgagagtgaacaccaagtgaaaattggagacttcggtttaaccaaagcaattgaaaccgataaggagtattacaccgtcaaggatgaccgggacagccctgtgttttggtatgctccagaatgtttaatgcaatctaaattttatattgcctctgacgtctggtcttttggagtcactctgcatgagctgctgacttactgtgattcagattctagtcccatggctttgttcctgaaaatgataggcccaacccatggccagatgacagtcacaagacttgtgaatacgttaaaagaaggaaaacgcctgccgtgcccacctaactgtccagatgaggtttatcagcttatgagaaaatgctgggaattccaaccatccaatcggacaagctttcagaaccttattgaaggatttgaagcacttttaaaataagaagcatgaataacatttaaattccacagattatcaa

SEQ ID NO: 186 - DNA, 2457 bp, Homo sapiens
cgctgttgcctccgccacctcctccgccgccgcgcgcccctcggagttccgcgccccaccatgcccaacatcgtgctgttcagcggcagctcgcatcaggacctatcccagcgcgtggccgaccgcctgggcctggagctgggcaaggtggtcacgaagaagttcagcaaccaggagaccagcgtggagattggtgaaagcgtgagaggggaagatgtctacatcatccagagcggctgcggggaaattaacgacaacctgatggaactcctcatcatgatcaatgcctgcaagattgcgtcatcatccagagtaactgccgtgatcccgtgtttcccatacgcccgacaagataaaaaggacaagagtcgtgccccaatttctgcaaaacttgtggccaatatgctgtcggtggctggggcggatcacatcatcaccatggacctgcatgcttctcagatacagggattctttgatattcctgtggataatttgtatgcggagcccgcagtcctgcagtggattcgggaaaacattgccgagtggaagaactgtatcattgtttcacctgacgcagggggagccaaaagggttacatcaattgcagacaggttgaatgtggaatttgctttgatccacaaagagaggaagaaggcgaatgaagtggaccggatggtcctggtgggcgacgtgaaggaccgtgtggccatcctcgtggatgacatggctgacacttgcggcaccatctgccatgctgcggacaagctgctgtcagctggagccaccaaagtgtatgctatccttacccatgggatcttctctggaccagctatttccagaataaataatgccgcctttgaggctgttgtcgtcacaaacacaattccgcaagaggacaaaatgaaacactgcaccaagattcaggtcattgacatttccatgatcttggccgaagcaatccgaaggacacacaatggggaatccgtgtcctacctgttcagccatgtcccgctataaatccagaatgggaagtgtccagcaagcctactctgacttctgacttgtttttgttttctggatttttagctgtaggtattcagcaatgataggttaatcactggcaaaagcatcagatctttgtatatgctaagatttattgtttccccttctaaagctcaagatcatttctttccagtttttggggaaatggtggtggttatttggtctttaagtgaactgtcttaaatgagaaacgtttttgtcattttgacttttaacaggtacaggtgatctcttcctttgttctttcagtactttgaggcgacaactttcaagtatataatttcattgtggaagtcatagtttatatatttcgaggttgccaaaggtgacttcacattaaagccttctgtgtaaatatatactgataatgcctatggacatttgggtaaaaccctgtatagaattaattatccttttactttggagtgaaccttggaaaatttataattataataccatggattttgaattttccttttttttttttttttttggataactcagtttcagataaaccatcttggttactgtgcttaatttggaccaaattttatttagcttaatatggacactgacacattttggggggtatacattagacatatcagagcagtgtatttctggatcattttttaaatgacctcttctaaaacataactgtcacttacctgaaatgctgcatcctaaaattccaaaattatattgagcaatcgccaaggcctaaagccaactgacttaaaggtaatcatttcagctaagattaaatttaaagcctaagaatgtatagagctagttttaaaataatgatctcagatttttaaaaaggatataggaacctgcattgtcattctctgaattaagaactgatggtttctatcattatttagccccacctttgtattttaaaatccttcagaatacatttatgaaccaatgcgactggacttagccacacacaatggaaattcagaccttgactatttggtgtttccagttcacaaaggtgatgaagactgtcttgggagcagcttaatcccaaaatttgtacatttcttgctgctcctggcgtggaaacttaagtgagaccaccaaatacattggtcctgtccaattctactgaatgggggtggacctggcatttatctggccaaaaacaggagccagagaaatatgaatataccaaagttgtttgtttagcctccaacttaaattacattagtcaacttatagatactcatatgatcacttttctttttagatactacatcaactagattcaggagtatatcatttgcagtgcttgtattggtttaaaatgtaagattttaagatcctctaacactgtactaaaacatttcaataaaatcattctgactgcgttcaaaaaaaaaaaaa

SEQ ID NO: 187 - DNA, 1585 bp, Homo sapiens
tttttttttttctttttttcttttcttgttttttttttttttttggcgtggagcatttccgaactttcacgtcataaaaaatgcagcatagttaatcagcagcttgcacttctgagggcacattcacctcgggggaggaggaaggaggaggagctggtgggtgctgagactgcagtgtcctccttcccagcagctggacccagagaccaggcaccatatttttttgatgaaattatcctaaggaaataatcaaatttgtacagaaatttatgttaaaaaatgttcatggcagcaccgtttaaaatggggagaaaattggaaacaacagaattgtagcaatacatatgatcattaaaaattatgttttagaaagatttttaacagtctttggaaaaagttggtgacatgttgctagtttttaaaaaaagtacagagtatgtacagtatgattccaattttgtgtttaaaaattagacatagtggtaacctagcttcagttccagataagatggagaaggcatactcctttcatgtctcccactgaatgcagctataaatcctggagagtagacagggagaaactatttgaggactctggaacaaagacatagtagcaatcgactggtgaagaagacaagaatttgaagtacggtcaagtatctgtgggctccacatctgtagatacaacctacatgtattgaaaatatcagaaaataaaaataacaatacaacaataaacatcaatacaaataacacaccaatacagtatagcagctacttacataacactgacattgtattaggtagaagtaatctagagatgatttaaagtctgtcggaggatgtgtgtagcctgtatgtaaaaaccacgttattttatatgggggactttagcatccaaggatttgaatatccacgggggtcctggaacaagttccccatagacaccaagaaacaactgtattcctgaaacagtcttgagttatcattttctttcttctccctctatgtatgtacatagagtgtacatacatagagtgagaagcaaagaaggtccatgaaatggaccaattcttttgaaaactgcaaattaccacagttcatctaacatgaaatagataacctgaatggtccaataactagtaaagatattgaattaatagtttaaaaaccttctgaaaggtaaatctctaccctaaatgatttcactggtgaattctatcaacacatttaatgaagaaaaaactccagttctaaacaactttcagaaaagaagagggaacacttcctcactcattatatgaggtaagcattgccctaataccaaaaccaatgttaacacaaaatatgaaacctacagaccaataaccctcatgaacataaatgtaaaaatcctcaagaaaacattagcaaatttaaaccagcaggatataaaaggaataataatacaccataacaaaaaaagaaactatccttggaatgcaaggctggttcaatatttgaaaatcaatcagtgtaatctaccatattaacagtctgaagaagaaaaatcatgattatatcaatacaaaaaaaaaaaaaaaaa

SEQ ID NO: 188 - DNA, 581 bp, Homo sapiens
agcaggtgagcctgcgatgcgcgggaagacgttccgctttgaaatgcagcgggatttggtgagtttcccgctgtctccagcggtgcgggtgaagctggtgtctgcggggttccagactgctgaggaactcctagaggtgaaaccctccgagcttagcaaagaagtggggatatctaaagcagaagccttagaaactctgcaaattatcagaagagaatgtctcacaaataaaccaagatatgctggtacatctgagtcacacaagaagtgtacagcactggaacttcttgagcaggagcatacccagggcttcataatcaccttctgttcagcactagatgatattcttgggggtggagtgcccttaatgaaaacaacagaaatttgtggtgcaccaggtgttggaaaaacacaattatggtaaaataaagtgttctccttttaagggtgggtttaataacatattatgaaagtagtattttgtactatcgtcaggaaaccaaataagatatatatgtgctcttaattttaagtgtgtatgtgcattaaacaaaaattagcttacaaaaaaaaaaaaaaaa

SEQ ID NO: 189 - DNA, 3171 bp, Homo sapiens
gcggaacaccggcccgccgtcgcggcagctgcttcacccctctctctgcagccatggggctccctcgtggacctctcgcgtctctcctccttctccaggtttgctggctgcagtgcgcggcctccgagccgtgccgggcggtcttcagggaggctgaagtgaccttggaggcgggaggcgcggagcaggagcccggccaggcgctggggaaagtattcatgggctgccctgggcaagagccagctctgtttagcactgataatgatgacttcactgtgcggaatggcgagacagtccaggaaagaaggtcactgaaggaaaggaatccattgaagatcttcccatccaaacgtatcttacgaagacacaagagagattgggtggttgctccaatatctgtccctgaaaatggcaagggtcccttcccccagagactgaatcagctcaagtctaataaagatagagacaccaagattttctacagcatcacggggccgggggcagacagcccccctgagggtgtcttcgctgtagagaaggagacaggctggttgttgttgaataagccactggaccgggaggagattgccaagtatgagctctttggccacgctgtgtcagagaatggtgcctcagtggaggaccccatgaacatctccatcatcgtgaccgaccagaatgaccacaagcccaagtttacccaggacaccttccgagggagtgtcttagagggagtcctaccaggtacttctgtgatgcaggtgacagccacagatgaggatgatgccatctacacctacaatggggtggttgcttactccatccatagccaagaaccaaaggacccacacgacctcatgttcacaattcaccggagcacaggcaccatcagcgtcatctccagtggcctggaccgggaaaaagtccctgagtacacactgaccatccaggccacagacatggatggggacggctccaccaccacggcagtggcagtagtggagatccttgatgccaatgacaatgctcccatgtttgacccccagaagtacgaggcccatgtgcctgagaatgcagtgggccatgaggtgcagaggctgacggtcactgatctggacgcccccaactcaccagcgtggcgtgccacctaccttatcatgggcggtgacgacggggaccattttaccatcaccacccaccctgagagcaaccagggcatcctgacaaccaggaagggtttggattttgaggccaaaaaccagcacaccctgtacgttgaagtgaccaacgaggccccttttgtgctgaagctcccaacctccacagccaccatagtggtccacgtggaggatgtgaatgaggcacctgtgtttgtcccaccctccaaagtcgttgaggtccaggagggcatccccactggggagcctgtgtgtgtctacactgcagaagaccctgacaaggagaatcaaaagatcagctaccgcatcctgagagacccagcagggtggctagccatggacccagacagtgggcaggtcacagctgtgggcaccctcgaccgtgaggatgagcagtttgtgaggaacaacatctatgaagtcatggtcttggccatggacaatggaagccctcccaccactggcacgggaacccttctgctaacactgattgatgtcaacgaccatggcccagtccctgagccccgtcagatcaccatctgcaaccaaagccctgtgcgccacgtgctgaacatcacggacaaggacctgtctccccacacctcccctttccaggcccagctcacagatgactcagacatctactggacggcagaggtcaacgaggaaggtgacacagtggtcttgtccctgaagaagttcctgaagcaggatacatatgacgtgcacctttctctgtctgaccatggcaacaaagagcagctgacggtgatcagggccactgtgtgcgactgccatggccatgtcgaaacctgccctggaccctggaaaggaggtttcatcctccctgtgctgggggctgtcctggctctgctgttcctcctgctggtgctgcttttgttggtgagaaagaagcggaagatcaaggagcccctcctactcccagaagatgacacccgtgacaacgtcttctactatggcgaagaggggggtggcgaagaggaccaggactatgacatcacccagctccaccgaggtctggaggccaggccggaggtggttctccgcaatgacgtggcaccaaccatcatcccgacacccatgtaccgtcctaggccagccaacccagatgaaatcggcaactttataattgagaacctgaaggcggctaacacagaccccacagccccgccctacgacaccctcttggtgttcgactatgagggcagcggctccgacgccgcgtccctgagctccctcacctcctccgcctccgaccaagaccaagattacgattatctgaacgagtggggcagccgcttcaagaagctggcagacatgtacggtggcggggaggacgactaggcggcctgcctgcagggctggggaccaaacgtcaggccacagagcatctccaaggggtctcagttcccccttcagctgaggacttcggagcttgtcaggaagtggccgtagcaacttggcggagacaggctatgagtctgacgttagagtggttgcttccttagcctttcaggatggaggaatgtgggcagtttgacttcagcactgaaaacctctccacctgggccagggttgcctcagaggccaagtttccagaagcctcttacctgccgtaaaatgctcaaccctgtgtcctgggcctgggcctgctgtgactgacctacagtggactttctctctggaatggaaccttcttaggcctcctggtgcaacttaatttttttttttaatgctatcttcaaaacgttagagaaagttcttcaaaagtgcagcccagagctgctgggcccactggccgtcctgcatttctggtttccagaccccaatgcctcccattcggatggatctctgcgtttttatactgagtgtgcctaggttgccccttattttttattttccctgttgcgttgctatagatgaagggtgaggacaatcgtgtatatgtactagaacttttttattaaagaaa

SEQ ID NO: 190 - DNA, 4999 bp, Homo sapiens
gaggaggattcgcagttcaacatcaaggtccctgtgcgttttattgcgacctgccggtgggaactttgtctccgagtcggagcagcatggagcggcggagcgagagcccgtgtctgcgggacagccccgaccggcggagcggcagcccggacgtcaaggggcctcccccagtgaaggtggcccggctggagcagaacggcagccccatgggagcccgcgggaggcccaacggcgccgtggccaaggccgtgggaggtttgatgattcctgtcttttgtgtcgtggagcagttggacggctctcttgaatatgacaacagagaagaacacgccgagtttgtcctggtgcggaaagatgtgctttttagccagctggtggagactgcgctcctggccctggggtattctcacagctctgcggcccaggcccaaggaataatcaagctgggaaggtggaaccctctccccctcagttatgtgacagatgcacccgacgcgacagtggccgacatgctacaagatgtctatcatgttgtgacgttgaaaatccaattacaaagttgttcaaagttggaagacttgcctgcggagcagtggaaccatgccacagtccgcaatgccttaaaggaactgctcaaagagatgaaccagagcacattagccaaagaatgccctctctcccagagtatgatttcatccattgtaaatagcacatattatgccaatgtgtcagcaaccaagtgccaggagtttgggagatggtataaaaagtacaagaagattaaagtggaaagagtggaacgagaaaacctttcagactattgtgttctgggccagcgtccaatgcatttaccaaatatgaaccagctggcatccctggggaaaaccaacgaacagtctcctcacagccaaattcaccacagtactccaatccgaaaccaagtgcccgcattacagcccatcatgagccctggtcttctttctccccagcttagtccacaacttgtaaggcaacaaatagccatggcccatctgataaaccaacagattgccgttagccggctcctggctcaccagcatcctcaagccatcaaccagcagttcctgaaccatccacccatccccagagcagttaagccagagccaaccaactcttccgtggaagtctctccagatatctaccagcaagtcagagatgagctgaagagggccagtgtgtcccaagctgtctttgcaagagtggcattcaaccgcacacagggattgttgtctgagattctgcgtaaggaagaagaccctcggacagcctctcagtctcttctagtaaacctgagggccatgcagaatttcctcaatctgccagaagtggagcgagatcgcatctaccaggatgagagggagcggagcatgaatcccaatgtgagcatggtctcctcggcctccagcagtcccagctcctcccgaacccctcaggccaaaacctcgacaccgacaacagacctccctattaaggtggacggcgccaacatcaacatcacagctgccatttatgacgagatccaacaggagatgaaaagggccaaggtgtctcaagccctgtttgccaaagtggctgcaaataaaagtcagggctggctgtgtgaactgctccgctggaaggagaacccaagcccagaaaaccgcaccctctgggaaaacctctgtaccatccgtcgcttcctgaaccttccccagcatgagagggatgtcatctatgaggaggagtcaaggcatcaccacagcgaacgcatgcaacacgtggtccagcttccccctgagccggtgcaggtacttcatagacagcagtctcagccagccaaggagagttcccctcccagagaagaagcgcctcccccacctcctccgactgaagacagttgtgccaaaaagccccggtctcgcacaaagatctccttagaagccctggggatcctccaaagctttattcatgatgtaggcctgtacccagaccaggaagccatccacactctttcggctcagctggatctccccaaacacaccatcatcaagttcttccagaaccagcggtaccacgtgaagcaccacgggaagctgaaagagcacctgggctccgcggtggacgtggctgaatataaggacgaggagctgctgaccgagtcagaggagaacgacagcgaggaaggctccgaggagatgtacaaagtggaggctgaggaggaaaatgctgacaaaagcaaggcagcacctgccgaaattgaccagagataatgtgaacttctactaggcaaagcaatacatcggtccaaggattttctgctttcatttctttaaaagttttttgttagtttgttttttgtttttgtttttgggtttttttggctttatttttgtctttttatgtctgttttgtttttcttacccttttggacatttctttgttgcacaggatacacctatagactgaataagttcagtatttccgaatcagacatcgccttggcaaagacactaaagcgttacactttatcccgtctctatgactggatcatagtcattataatcacaggagactctgccttcattatccttgcacttaacggaagttacatcaggcaagttccaggatgaaaagaactatgaaataaatgaaggaagctacaagtgtgtgtgtatatgtatatgtatatatctctatatttacatatatatattaaaattgcatgggacagagactttgcaatccgaaagaatagactgtgaaatgagttcttaaagaaaagacttgtttatgtattaaaaaaaccacttcacagtgagtcgctttggctttttgataaactgcggcctgctctcagggtggggtgactatttttgaattcctatttattttttgtgtttgtccctgatttttttttttaattctatggcttcctatctggcagcttaatgggtaatttttgaggtatgtatttaacaaaataaacgacactgccgaaaaaaaaaaaagtgaagtgaaaacaatcagggcacattaaaatgatacaagtcaaataaatcttaaagacacaatgcacacttaaaatgactcaataaaatgacttgctacgttccgttattcaatttgtcattactgtagtgaacagatgcatttctgtggaattccaaataagtaaaactgaaattcagtgcagagaaaactttgtccactagtgcaagtcttgatcaaatgacattttgacattggacatatggaattcatagtatgagccacattttgttgtgaaatttatttacctgcttgtggcttcaaatctgaaaattaataagcctgctcgtttaaaagttgtttgttgttgctgtttttttgtctttttgttttttactagaaaatagttcagtgtaatattaagttagaaaagaagttgctgcccagttaaaggggctccctctcaaataaatctccatccttccctctcccaaaagacatttctgatttctgcttcactttgggcttcctcttcttcgtacacattccatctacctaatcaaacattttcagtccctgatctctcctgtcccttttcctgggatgacagccctaacaagaactgtttttgaatcgttgtgcagctccaggcaatagagtatgtgaagcgatttcagtagaatcacttactcatcctaaaagaaaacattatcccagttacctacatcgcaattaccttatgtaaagcagaactaatgctgactggatgtttaatgggatgagcattaaagctgcaatctactatagtactccagatctctttcggcttcctatgagaaacaccagaagcattactttccacttctacttacagtaattgcaagaggagacctcacattcaggactggcctagtgaacgtaatccatgctttaaactggccattaaacagtcccacatggttggattttttttttttttttgagttgtgctttcacaaaaccttgtcaaagacctcatgcaatatcactttgaaagttattttctgtttactacacaaacattgtaatataactgttaatactatttatatatttgaaaggtataaaaggtaggagttaaaaaaaaaacctctatgtgtagatattaactcagaacttacaatatacagggagaagacatgttgcaatacaagctaattctagctgctcagtaacctctggagtttttaaagggacattttcctgtactttttcaaataatgatgtttaaaaattatcttgacataagcgtcatatacctttgcaaaaggatggttgtttgcagttagccctggccccatccttcctatttctgtagtatgctgcagctttaatcagaaagtccatggttgctgcttcctgatctccgagttactctttccaaattgtcttcttacactgttgctgaaggtcactctgtacacgtaatggaaactgattttgccaagctcttacaaggtggttcatctatcgatggcatccgcatttggtatcttttacacttcaaccaaaaatttattaggtatttttcaatgctaagtcttgccttttattttttaatttcactgccaagtttgcagtggttctaagtgaatctgtgggcattttagcctgtggtcttgccagatctttgcgaattacaatgcatatatgtctatttattcaatatctgtcatataatatctatttggaagaagaaactttctcttgtagtgcctcttgacaaagcacaatttcccgcctttttttttttttttgtgaaatgaaaaaaacaaattgtgttttattgcggtatcaacaatgtgaataaggattaacatattgtaaatgttcttttttccatgtaaatcaactatctttgttatcactaagtgataattaatttttaacttatgtgcattgttaggctgttagaattttttggttgttaaaataaacgcattcaataaatatg

SEQ ID NO: 191 - DNA, 3250 bp, Homo sapiens
ccaacttatttaaaacaaaacaattttgtaggtattattatacccatttcacagatgatgataaatgagaccaatagaagttaaataacttgccaaaggccacacagctggtgagtgatggagaacgaattaaaactcaagtgagcataattctaaaagccatcttctcgttagtgtttctcactatccaggtctgcctttgccttatttaactgaagttaagccatccttacctgtgatcacctagcctctcagtttggggggatcattacagcgggtttttaactcccaatgttctggtccagtttgctttacatgttcttatttatacattgtcaaggatgacctcaggacagtacagcaaggacacagtggcacttcacattttgttcccacgaaatgactggggcataatctcagatcatcttcctttagaatgtggaaacatcagcagaagaatattagtctttatacaagtcaaatccaaaatgacacatgtgaaaactaatagagctgactttcagccatgatagctttggcacacctcacatccctttgttcaacctctcttccctcaacggagagctgcattcctgggaatttctgttgtgcacttttcccacttgccctgctgtcatttaaaggtgaacattctagttttgctaagaaaaccctttccttcatttggaatgaacagcaattttattacttttgaccttaaaatgagtttgctgccttcaaatcttttcagcgccttcatcacgctctgcttcggggcgatcttcttcctgccagactcctccaagctgctcagcggggtcctgttccactccagccccgccttgcagccggccgccgaccacaagcccgggcccggggcgcgcgccgaggacgcggccgaggggcgagcccggcgccgcgaggagggggcacccggggacccggaggccgccctggaggacaacttggccaggatccgcgaaaaccacgagcgggctctcagggaagccaaggagaccctgcagaagctgcccgaggagatccaaagagacatcctactggagaagaagaaggtggcccaggaccagctgcgtgacaaggcgccgttcagaggcctgcccccggtggacttcgtgcccccaatcggggtggagagccgggagcccgccgacgccgccatccgcgagaaaagggcaaagatcaaagagatgatgaaacatgcttggaataattataaaggttatgcctggggattaaatgaactcaaacctatatcaaaaggaggccattcaagcagtttgtttggtaacatcaaaggagcaactatagtagatgccctggatacactttttattatggaaatgaaacatgaatttgaagaagcaaaatcatgggttgaagaaaatttagattttaatgtgaatgctgaaatttctgtctttgaagtaaatatacgctttgttggtggactactctcagcctactatctgtctggagaagagatttttcgaaagaaagcagtggaacttggggtaaaattgctacctgcatttcatactccctctggaataccttgggcattgctgaatatgaaaagtggtattggaaggaactggccctgggcctctggaggcagcagtattctggcagaatttggaaccctgcatttggagtttatgcacttgagccacttatcaggaaaccccatctttgctgaaaaggtaatgaatattcgaacagtactgaacaaactggaaaaaccacaaggcctttatcctaactatctgaatcccagtagtggacagtggggtcaacatcatgtatcagttggaggacttggagacagcttctatgagtatttgctgaaggcctggttaatgtctgacaagacagatctggaagctaagaagatgtattttgatgctgttcaggctatcgagactcatttgatccgcaagtctagcagcggactaacttatatcgcagagtggaaaaggggcctcctggagcacaagatgggccacctgacctgcttcgcggggggcatgttcgcactcggggctgatgcagctcccgaaggcatggcccaacactaccttgaactcggggctgaaattgcccgtacttgtcatgaatcatataatcgaacatttatgaaactgggaccagaagctttcagatttgatggtggtgttgaagccatcgctacaagacaaaatgaaaaatactacatcttacggccagaagttatggagacttacatgtatatgtggagactgactcatgatccaaagtacaggaaatgggcctgggaagccgtagaggccttggaaaaccattgcagagtgaatggaggctattcaggcctaagggatgtttaccttcttcatgagagttatgatgatgtgcagcagagtttcttcctggcagagacattgaaatatttgtacctaatattttctgacgacgatcttcttccactggagcattggatcttcaatagcgaggcacatcttctccctatcctccctaaagataaaaaggaagttgaaatcagagaggaataaaaaagacatttatattttattctgctccattcccttcactgtataccttaataattccttttctggtaatcaggcacatgatgaactttgattagtaggtctgtgattaagttcttaaattgttttgcagtcttttatgtttattatcataggtataggtggacctaaattccttatcatatctttattaattcagccagtgtatccaccagttttttgtttatgtttttaagtaacctattatctctggatttcatgaaggtgtaatatcgtttttgttaaactgaatagaattgtatagcgatgacctcttaattataatttgatttgactgcaaaactttttcctcctctaagaggagatgatgtctgctttaagctgtaatgttttgccatgttgcaaaaagccataataataagtataaaaaagctttttcctttacaatttcatgttaatctggtttgtctgtccaccagagacagatcttctgtgacagcctccttatgcaggtctatcattatttgatagaatgtcttctaaaatacttcactcacattgtaattcaaattagaaagtcattccaaaaggtcatgtcatgttgacctcatttcatcggaactgcagtatatttttgttggttaattatattagtgttttctattttgaaaaaaaaaaaaaaaaaa

SEQ ID NO: 192 - DNA, 4318 bp, Homo sapiens
gttacatttatgacatcctgggtggaattcttaagaaatattggactaaaatacatactttctcagcagcagttgttacagtttgctaaggaaatcagtgtgagggctaatacagaaaactggtccaaagaaacattgcaaaatacagttgatatccttctgcatcatatattccaagaacgaatggatttgttatctggaaattttctgaaagaactatctttaataccattcttatgtcctgagcgggcccccgcggaattcattagatttcatcctcaatatcaagaggtaaatggaacacttcctcttataaagttcaatggagcacaggtaaatccaaaattcaagcaatgtgatgtactccagctgttatggacatcctgccctattcttccagagaaagctacacccttaagcattaaagaacaagaaggtagtgaccttggtccacaagaacagcttgaacaagttttaaatatgcttaatgttaacctggatcctcctcttgataaggtaatcaataactgcagaaacatatgcaacataacgacgttggatgaagaaatggtaaaaactagagcaaaagtcttaaggagcatatatgaattcctcagtgcagaaaaaagggaatttcgttttcagttgcgaggggttgcttttgtgatggtagaagatggttggaaacttctgaagcctgaggaggtagtcataaacctagaatatgaatctgattttaaaccttatttgtacaagctacctttagaacttggcacatttcaccagttgttcaaacacttaggtactgaagatattatttcaactaagcaatatgttgaagtgttgagccgcatatttaaaaattctgagggcaaacaattagatcctaatgaaatgcgtacagttaagagagtagtttctggtctgttcaggagtctacagaatgattcagtcaaggtgaggagtgatctcgagaatgtacgagaccttgcgctttacctcccaagccaggatggtagattggtaaagtcaagcatcttagtgtttgacgatgcgccacattataaaagtagaatccaggggaatattggtgtgcaaatgttagttgatctcagccagtgctacttagggaaagaccatggatttcacactaagttgataatgctctttcctcaaaaacttagacctcgattattgagcagtatacttgaagaacaattagatgaagagactcccaaagtttgtcagtttggagcgttgtgttctcttcaaggaagattgcagttactcttgtcttctgaacagttcattacaggactgattagaattatgaagcatgaaaatgataatgcttttctggccaatgaagaaaaagccataagactttgcaaagccctaagagaaggattgaaagtatcctgctttgaaaagcttcaaacaacattaagagttaaaggttttaatcctattccccacagcagaagtgaaacttttgcttttttgaagcgatttggtaatgcagtcatcttgctctacattcaacattcagacagtaaagacattaatttcctgttagcactggcaatgactcttaaatcagcaactgacaatttgatttctgacacttcatatttaattgctatgctaggatgcaatgatatttacaggattggtgagaaacttgacagtttaggagtgaaatatgactcttcggagccatcaaaactggaacttccaatgcctggcacaccaattcctgctgaaattcattacactctgcttatggacccaatgaatgttttttacccgggagaatatgttgggtaccttgttgatgctgaaggtggtgatatctatggatcataccagccaacatacacatatgcaattattgtacaagaagttgaaagagaagatgctgacaattctagttttctaggaaagatatatcagatagatattggttatagtgaatataaaatagttagctctcttgatctgtataagttttcaagacctgaggaaagctctcaaagcagggacagtgctccttctacaccaaccagccccactgagttcctcacccctggcctgagaagcattcctcctcttttctctggtagagagagccacaagacttcttccaaacatcagtcccccaaaaagcttaaggttaattctttaccagaaatcttaaaagaagtgacatctgtggtggagcaagcatggaagcttccagaatcggaacgaaaaaagattattaggcggttgtatttgaaatggcatcctgacaaaaatccagagaaccatgacattgccaatgaagtttttaaacatttgcagaatgaaatcaacagattagaaaaacaggcttttctagatcaaaatgcagacagggcctccagacgaacattttcaacctcagcatcccgatttcagtcagacaaatactcatttcagagattctatacttcatggaatcaagaagcaacgagccataaatctgaaagacagcaacagaacaaagaaaaatgccccccttcagccggacagacttactctcaaaggttctttgttcctcccactttcaagtcggttggcaatccagtggaagcacgcagatggctaagacaagccagagcaaacttctcagctgccaggaatgaccttcataaaaatgccaatgagtgggtgtgctttaaatgttacctttctaccaagttagctttgattgcagctgactatgctgtgaggggaaagtctgataaagatgtaaaaccaactgcacttgctcagaaaatagaggaatatagtcagcaacttgaaggactgacaaatgatgttcacacattggaagcttatggtgtagacagtttaaaaacaagataccctgatttgcttccctttcctcagatcccaaatgacaggttcacttctgaggttgctatgagggtgatggaatgtactgcctgtatcataataaaacttgaaaattttatgcaacaaaaagtgtgaagatatttaacgaaaaaaaaggtagatcttgaatgtgttgtagcacgaataaattgctgtacttcattaagcttcattgccaattagctaggaattgttaagcacattgcagattgttcttggagaattctggagttgttatgaacatgaataccaacggaaaaccttaactgaatctaaaagaaaactattttgaagatggtggtgagctgcaaaatagctggatggatttgaatgattgggatgatacatcattgaactgcactttatataaccaaagcttagcagtttgttagataagagtctatgtatgtctctggttaggatgaagttaattttatgtttttaacatggtatttttgaaggagctaatgaaacactggacatataattggtttaaacataaggggaattaagtctttgtagtctgtcatttttttaagtggatcctcttggatgcgttattttctcatcagctggctctgatcatgaatttgttgtaattttatgttgtactcagtgcatttaagaaatggtagagtattttaatcctattacttgactaagagtgtgaaggtagtactttttagagtgcactgagtgcactttacatctttatttaaatttttttttaacatcttatgtttacaggcttcctgtttgatgaagatagcaacggaaaactcaaaatggtggcagttcttattaccagttgttagtattgtttctggaaactgcttgccaagacaacatttattaactgttagaacacttgctttatgtttgtgtgtacatattttccacaaatgttataatttatatagtgtggttgaacaggatgcaatcttttgttgtctaaaggtgctgcagttaaaaaaaaaacaaccttttctttcaatatggcatgtagtggagtttttttaactttaaaaacatcaaaaattgttaaaatcattgtgttatctagtagtttataattatcggcttatatttccccatgaatgatcagaactgacatttaattcatgtttgtctcgccatgcttctttactttaacatatttcttttgcagaatgtaaaaggtaatgataattagtttatataagtgtactggctgtaaatgatgctaaatatactttatgcaattaagggcttacagaacatgttgaaactttttttacttttattgggaataaggaatgtttgcacctccacattttattgcttctggatgtgaaatcatgtaattatttctgctgttatataaagtgccatacttttaataaaggaaaatgtacatatg

SEQ ID NO: 193 - DNA, 1003 bp, Homo sapiens
gcacatgcgcagaatcatcgtggtgcagggctctccctttgcttcttcggttgcagtcctcttgcttcttgcgcgtgcgtgtagcgcttttgcaaagccgcggaggtgaagtgaacttagaggttgtggggccgaggggtcgtcttatagctaccagcccacaggcatttagtctacgttgggaggtaaacaaatacgggtcctgcttaggagaaaagaaaaacgtcttacagccagtgtctaaactccaaacaacggaatgtatcaatgagaccttgtatatggatacacgtgcatttaaaaccgccctgccggcttgtagagcttttgccgttctccagcgctttacaggggttatcgcacttaagcctcggaacaactttaccagtgattctaccagaaaggaatgaagaacagaaccttcaggaattgagtcacaatgcagacaaatatcaaatgggagattgttgcaaggaagagatttgatgatagtattttctactagccattgggaagataaaaggagacagaagattgaagcctttgccagccattctttccctttttgcttccaaactcctcaactgggaaccttcatatgtgcagtatttatattggatcatactggtgattataaaagttcctaggaggctagaagagccaaccaacagagaagggaaagcagtctgttctgaacatagggacataagttcattcatgccaagtatctttccagcatgtttctcccatttagaatatctagcatgtaaggcctttcaatattaatataagcccaatatcagctctttctctttgtatttcatctctttctactctcctatttgtattttgtgttcctatcaaagtgtcgtatctgggagatgacctgccttatcctgttctataacagttttgtttggtgctgtgtctttagaacagtgcctggcacacagtaagcactcaataaatctttgatgaatgaaaaaaaaaaaaaaaaaaaaaa

SEQ ID NO: 194 - DNA, 3038 bp, Homo sapiens
ccagcgtgctgaagccggagcgagctagccgcccggagccgcgccgacccagctgagcccagcccacgggacgccagacctcgaccgtcgctcctaccccggccaccgctcggagccgaggcggacgcgtcccgatcttcccctgtccccaccctgccccgaccctcctctccacctctcgcgtcgtgacaccagctggtaaatactccgctgttcgtccctcaaaccctcggcagccagccgtgggcgtgagggagggttctctctcctctcgatgggggtgttgcaaacacagcggggagccccctggtaagggtccccggtaaacgggggagtcgcagctttttctcttgctgctgaagtcgcccacgcaccatccggggagtcctacggggagggagcagagatttttttttcccccatattgctgctgcttagtacgtgggcgatggcagtgagatggctcagggaaggccgaggaggccctgggtaagcgagggcttcgggggttattttcccatttacacggctccagagatcggcacaacatcttcctcctttgctcctaaacgttcctcttctgggtaaggtttgggggatcagggaagccccgggtttcctgctgaaaggtgggggaagggaacgtagacctagagaggggggaattcttacagaaatcctctttttttggtcccttctatttttcagtctccggcagcctccatgaaagccctcagattgtcggcttccgccctcttctgccttctgctgatcaacgggttaggggcagcaccccctggtcgccctgaggcgcagcctcctcctctcagctctgagcataaagagccggtagccggggacgcagtgcccgggccaaaggatggcagcgccccagaggtccgaggcgctcggaattccgagccgcaggacgagggagagcttttccagggcgtggatccccgggcgctggccgcggtgctgctgcaggcactcgaccgtcccgcctcacccccggcaccaagcggctcccagcaggggccggaggaagaagcagctgaagctctgctgaccgagaccgtgcgcagccagacccacagcctcccggcggccggagagcccgagcccgcggcgccccctcgccctcagactccggagaatgggcccgaggcgagcgatccctccgaggagctcgaggcgctagcgtccctgctccaggaactgcgagatttcagtccaagtagcgccaagcgccagcaggagacggcggcagcagagacggaaacccgcacgcacacgctgacccgagtgaatctggagagcccggggccagagcgcgtatggcgcgcttcctggggagagttccaggcgcgtgtcccggagcgcgcgcccctgccgcccccggccccctctcaattccaggcgcgtatgcccgacagcgggccccttcccgaaacccacaagttcggggaaggagtgtcctcccccaaaacacacctaggcgaggcattggcacccctgtccaaggcgtaccaaggcgtggccgccccgttccccaaggcgcgccgggccgagagcgcactcctgggcggctccgaggcgggcgagcgccttctccagcaagggctggcgcaggtggaggccgggcggcggcaggcggaggccacgcggcaggccgcggcgcaggaagagcggctggccgacctcgcctcggacctgctgctccagtatttgctgcagggcggggcccggcagcgcggcctcgggggtcgggggctgcaggaggcggcggaggagcgagagagtgcaagggaggaggaggaggcggagcaggagagacgcggcggggaggagagggtgggggaagaggatgaggaggcggccgaggcggcggaggcagaggcggacgaggcggagagggcgcggcagaacgcgctcctgttcgcggaggaggaggacggggaagccggcgccgaggacaagcgctcccaggaggagacgccgggccaccggcggaaggaggccgaggggacagaggagggcggggaggaggaggacgacgaggagatggatccgcagacgatcgacagcctcattgagctgtccaccaaactccacctgccagcggacgacgtggtcagcatcatcgaggaggtggaggagaagcggaaccgaaagaagaaagcccctcccgagcccgtgccgcccccccgtgccgcccccgcccccacccacgtccgctccccgcagcccccgcccccgcccccgtccgcacgagacgagctgccggactggaacgaggtgctcccgccctgggatcgggaggaggacgaggtgtacccgccagggccgtaccaccctttccccaactacatccggccgcggacactgcagccgccctcggccttgcgccgccgccactaccaccacgccttgccgccttcgcgccactatcccggccgggaggcccaggcccggcacgcgcagcaggaggaggcggaggcggaggagcgccggctgcaggagcaggaggagctggagaattacatcgagcacgtgctgctccggcgcccgtgactgcccttcccggtcccgcccccgcgcgcccccgccgcgcgcgcgcgccggcgcccccctccgtgttgctccccctcggtgtttgcatgcgccccgccctgccccttgcccctgtccccgggctgcgtcgggacctgccagacccccctcccgggtcctgagcccgaactcccagagctcacccgcgggtgaccggggccagcccaggagggcgggtggtttgtgcgagttcccttgccacgcgccccggccccatcaagtcctctggggacgtccccgtcggaaaccggaaaaagcagttccagttaattgtgtgaagtgtgtctgtctgtcctcccagtcgggcctcccacgagcccctccagcctctccaagtcgctgtgaatgaccccttctttcctttctctgttgtaaataccctcacggaggaaatagttttgctaagaaataaaagtgactatttt

SEQ ID NO: 195 - DNA, 2561 bp, Homo sapiens
gaactttccccttcagatcacctctgcgccacatctcatccatgcctcctccatgcactccagtccacactccccgtagcatcattccattgcccctcccatccatgctgggaccctcctggcccaccaaggcccaggcaccactgtgaatattctcctctgaaccactagagggcaggccaggcaggccaggcgggcccgtgcagcttgtgggcaagaaggagctggcaaggaccggcgctgctggagactgacccagccctctggctgaggacatgcagcggctcctaaatgtagagatgcctgtggctgagggggcctctctacctgtgtccccactcactccaggagcactggctttggtcacgtcttagcagcagggccttgctccgttgttcccttgccctggtggtgggggggccagaccgcctccggaatcctgccacctgtgactgtctgactgcttagtgcttcagctgtcccttccttgtgtcctgggggacctgctggcggcctcttcctgggagccatgacctcagaccccacccacactccagatcgagacccctgcctccccccggcaaatgtcctcccgctgccttgcagcctgcactttgcacatgctcacccccagcacagtcccactggcccctcacctccccttccctgagctccttcccaaggactcctggtcactgcctgctgtgcagtcagaggcccagggtccagcagcccggcgggaacgggtgctgcctcttcctccagttagctccagctcaggtctgagacccgtgctgagaaaggtctgagcaccgaccgtgccctctgcccagggctgggtcctgagcagctggttttcctgcaggaaggttggagcaagcaaagtccttctctgccctcagggtcagctgcccagactggggcggatgccagagaggcaggtgggctgtggctggactggtccggagctggcttccttaccagaaaagcctcagccttcctctggaagcatcccccgttctgggcaagggggaagggctcctttaaggggtgtgctttcccagtggggagcagtctggccctgccccctactaaagcctctgctctcagcactttcccccaagtccttgtaacttgcttgaaggtgggttctggctgccagccagtccctggacaaactctcctgccccttttaaatttcactcattttgtataaacccagcaggctggtgtttacttagccctgtagcttttttcattttttctttccgtctttcttcttgagttcacggttcaatattgcctcctcgccctggtgaggggaggtgctgcttttctgccccacctgccggctggttccagcagcgctggggcccagctggggggccgggatgggggcttctctctctgggaggggtgcaggtgccctccccaggctgggagggttccttccctagctccccatctgcccccgctggtgagagttgggcttcttggtcttggaactccctggcattgggaacagagcatttccagcatttgttgttgttgttttactcacctaacccttagaaaatgaatgttagaaggtgcctgccgaggcgggacagagtgttcgctcgcgctggagaaggctctgctcagccctgagagtcccttcctgccccaccgatactggcactttaacaaggaagctgaccgcacagtgtccagacgaattggcccccagaagatggggagttctgtcctgcccttctgtgtctgcgtgacctcacccagcctaggagggaggtgcattcagggtagatttgcctctcattcaaagttctggggctttgggtggaaaacagccagctttggcgctgttggggagactcctccagaccaggaaccccagaaggagacagagcctgccacatcctcccacgccaggccctgggccagggtgattggactgagaatttggccacaaccaaattgatgctggctggaaccagaggccagaaagcctggccttgtccccatgtgggagccctgtcctcagccctcttgtccccttgagctcagtgaattcccaccaggtgcccacagctcctggacttcaaattctatatattgagagagttggagagtatatcagagatatttttggaaaggagttggtctatgcaatgtcagtttggaatcttcttgaaagtttaatgtttttattaggagatttaaagaaaataaaggtctacaatatctttaggttttttttttttcctgtttaccgcacaaactgaccacatggcatgtctatcaggatggagggtgtccatgttctcctctgtctttagggaggtgataaggagatgggcggaggggtgtttttttctttgactcccctcctttctaacagaatgttgccaccactgcttgagtgggctgtgtttgttcctctgtcccagcttctgttgtagaaaataacattgttaggggaactcaggctagtgtcagcgtcttggtttggggagaaaaaattaaatgtttcggtttttgtttaaaaaaaaaaaaaaaaa

SEQ ID NO: 196 - DNA, 4544 bp, Homo sapiens
ccgagaagggcttcaggacgcgggaggcgcacttgcttcaagtcgcgggcgtgggaacggggttgcaaaacggggcctttttatccgggcttgcttccggcgtcatggctcaaagggccttcccgaatccttatgctgattataacaaatccctggccgaaggctactttgatgctgccgggaggctgactcctgagttctcacaacgcttgaccaataagattcgggagcttcttcagcaaatggagagaggcctgaaatcagcagaccctcgggatggcaccggttacactggctgggcaggtattgctgtgctttacttacatctttatgatgtatttggggaccctgcctacctacagttagcacatggctatgtaaagcaaagtctgaactgcttaaccaagcgctccatcaccttcctttgtggggatgcaggccccctggcagtggccgctgtgctatatcacaagatgaacaatgagaagcaggcagaagattgcatcacacggctaattcacctaaataagattgatcctcatgctccaaatgaaatgctctatgggcgaataggctacatctatgctcttctttttgtcaataagaactttggagtggaaaagattcctcaaagccatattcagcagatttgtgaaacaattttaacctctggagaaaacctagctaggaagagaaacttcacggcaaagtctccactgatgtatgaatggtaccaggaatattatgtaggggctgctcatggcctggctggaatttattactacctgatgcagcccagccttcaagtgagccaagggaagttacatagtttggtcaagcccagtgtagactacgtctgccagctgaaattcccttctggcaattaccctccatgtataggtgataatcgagatctgcttgtccattggtgccatggcgcccctggggtaatctacatgctcatccaggcctataaggtattcagagaggaaaagtatctctgtgatgcctatcagtgtgctgatgtgatctggcaatatgggttgctgaagaagggatatgggctgtgccacggttctgcagggaatgcctatgccttcctgacactctacaacctcacacaggacatgaagtacctgtatagggcctgtaagtttgctgaatggtgcttagagtatggagaacatggatgcagaacaccagacacccctttctctctctttgaaggaatggctggaacaatatatttcctggctgacctgctagtccccacaaaagccaggttccctgcatttgaactctgaaaggatagcatgccacctgcaactcactgcatgaccctttctgtatattcaaacccaagctaagtgcttccgttgctttccaaggaaacaaagagtcaaactgtggacttgattttgttagcttttttcagaatttatctttcattcagttcccttccattatcatttacttttacttagaagtatccaaggaagtcttttaactttaatttccatttcttcctaaagggagagtgagtgatatgtacagtgttttgagattgtatacatatattccagaacttggaggaaatcttatttaagtttatgaatataaccatctgttactgttctaaaaatgtttaaaagaaactcaatacagataaagataaatatgtgactattattgggtattacacttcacttctctttaatatttttcctccaactggagggcagacaattttctgacttgcttttctctaggtggttcattttgaaaggggacagaaatataactaaatgcttccaggagaaaaattccaagagttacaatctggacttggtacctaaatatcattttttaaattcttgatgcctatttggactagaggtaaacatactttcagattggcctgtttttgtcggtaaggcatacagccttcagaagccaacatttttaatcaaaaacttataaaacatgatgatcattgtgaaaattctgagttgaaggttagtttaagataagctaacaataacagtctgtgttttctctaaaataatctgagttttttggaactctttatttaaatatgtgtgtttttcagtattcaaataagatcaggaagccaattttctatgtatgaatatgctttaacctaggatttcagtccactctgactgactttctaaactttaacttgggtttttacagtgactatgcattagtgctgactctttggtataagccataaaatattttccttcctatcaatttatctgaactttggtcttttcactaaattgtacagtattctacttctgtttaaaaaggggagatgagaaagggaatactatctaaccaataacttgaacaaaaacactaaactaagcatttaatagaaatgctttttattgaggaggtattatccagagttcatgcttagaacaaatgcatctttgcgtatcctagacttaacaattcatcagtttctgagaccacagaatcaggttttccgtagtagataaagactctctggtgcttcaaattctgttcaagtgttttgactcatcagcttctactctttctattactgcctttgcctggcttgttttgtctctttgcaactgattttgcaaaaaaaaattgtagctttaaaataacagggtctaagtattttaaatgtgcctatttcacagctctcttggtcacaaaaacatgctatttttattggaacttcaaaccaaatccccactgagtgtgtactggttcctgcaggtagcagtctcctattatctcctgtttagcaccaaaagagctaatattattggaaactgaccttttaaaggccactggcagtaggatttaaaaagcagcccactgctcagtttccaggatcagcttcctccttctgtcacttgtgtaagttggcactaccttgtgcctctcagattgctgaagtgctgctggtaagcatgtgcatgctctgcctttcttgtgaaagttttcaatcagcgatatcagcacttacagtaagaagtaaaagtagtgcacagcaaagctaatttgcctttgcctggggtgttcagcttgaaagaataaagctcatttggtttagttaaatgtcttactctactgtgcctatgcttttagctgcgttactaagcaagggaaaaataacagtttctctgagccagagaagacttgatcacagttctccaagcatcgtgatagcaatgcttaaccccaggaagatttcaaggcagggagaagaacatttcaaataagattcttgttaacccatttatgcctagtgttccattattggaatgctaagcttgtgggagtcatttacatcctactgctcaaagtcattgccaaggtctgatttttcacacaaaaaattgcaacccccagcataaatgggttagctactgtcatcagttagcaaattcatccacacaaacacaattagagtttggtttttttttaagcttttcaaaacttactaaactggcacaattttatatgtatgctatttgttgtatttatgcttaagagcaaaaaagttttgatgggattttaaattcagcaaagcctacaacgctgagacaatcccctaacaacatggtagtaactaaagaaacttttatactaggcttcttagttttaaaaggaagtggcatcattgtttcagttctagtttgtatttttctctcagatatttttcttctttaaaaatctttcccagaagttggttcctagaaaactcaataccatcatctcttatctctatacagggactaggtaataaaaccttcaaaggttgtcaaaggtcatcaagcagtgttcatttatcctgtcacatgtttctgtttctatagtaatttagaaattgcaaatagttaacttttcatcatgtaaaaagttaacattatcctatttccatagataccatggacggcggtgtggcctgagttgtcagtctttaatcctgagtcatgtggctctcttttcatctttgatgtcagttccaattatttggcatcaaaaaccttcatggtaggtagagttttaggtaaaagtggatctagggttactttctttattaacatttcctaaataactgaattgagagacatactctgctactatgtcctcaggttaatttttgtctgatcttacgatgccctgccttttactagctactttagaaatagaaaatgtgaagagtgactatttacatgtatactcctttggctgctagaactcatctgtagtcctttattatttacactgaattccaatttcatttctcttccgctaagtaagagcacctcattcctgtgttttctctactattgagctgtagacgaactgtttctctaattataaagcaaactgtttgggatattcagggaaactaccccaatgttatgttgtcatttaatgggaaaggctgggatcatatgtatttctatgttctgtaaagtatttgacttactagttctcaataaaattttattaggactataaaaaaa

SEQ ID NO: 197 - DNA, 2078 bp, Homo sapiens
ctgttgattttttggagaaatatgggagaaacagtggaatatttttatgacatttttaggaaatcacctggcttggttggtagtcccacactgactttccttatgataattctacagatggaggtgactcgagcagtgatgaggataaagaataacatgaaactcctgtggaagtagaactcatgactcaggttgaccaagaggatatcactcttcagagtggcagagatgaactaaatgaggagctcattcaggaagaaagctctgaagacgaaggagaatatgaagaggttagaaaagatcaggattctgttggtgaaatgaaggatgaaggggaagagacattaaattatcctgatactaccattgacttgtctcaccttcaaccccaaaggtccatccagaaattggcttcaaaagaggaatcttctaattctagtgacagtaaatcacagagccggagacatttgtcagccaaggaaagaagggaaatgaaaaagaaaaaacttccaagtgactcaggagatttagaagcgttagagggaaaggataaagaaaaagaaagtactgtacacattgaaactcatcagaacacaagcaaaaatgttgcggctgtgcagccaatgaaacgaggacaaaagagtaaaatgaaaaaaatgaaagaaaaatacaaagaccaggatgaagaagaccgtgaacttatcatgaagttgctggggtctgcaggttcaaacaaagaagaaaaagggaagaaggggaagaaaggaaaaacaaaggacgaacctgtgaagaaacagccccagaaacctagaggtggacagagggtctctgacaacattaagaaagaaactccgttccttgaggttataactcatgagttacaagactttgctgtagatgatccacatgatgacaaggaagagcaagatctggatcaacagggaaatgaggaaaacctatttgattctttgacaggccagccacatcctgaagatgtactactgtttgccattccaatatgtgccccttacaccaccatgacaaactacaaatataaagtgaaacttactcctggagtgcagaaaaagggaaaagctgcaaaaacagccttgaatagtttcatgcattccaaagaagcaacagcaagagaaaaagacttattccgcagcgtaaaggacacagatttatcaagaaacattcctggcaaagtgaaaagtgtctgcacccaatcttctgaacgtaaaaaggaaatagctgaaatgaaattctaaaatatttgagaagagccaattttatagccttttggaagttcaaagatgaaagcaccatgtatcaggatttccgcattataaaaatgaactaaacattgccttgctatattcaccaaaaggacttaattcttgtttttttcccagttttatatagaggaaacactgtctatgataggatttccaaaagtatttgtggacagttaaatgctaattatatacatctgtagttattctacattttcttgaaatttgggaggttaataccaagtattcatttcatgatgtaaagaaactgaacagtgaagtggcttgattgcttaaactattgacttggtaagtctactgtatataacatctaatatatatattacaggccaaatgaactaaacattgccttgctatattcaccaaaaggacttaattcttgtttttttcccagttttatatagaggaaacactatgataggatttcctaaagtatttgtggacagttaaatgctaattatatacatctgtagttattctacattttcttgaaatttgagaggttaataccaagtattcatttcatgatgtaaagaaactgaacagtgaagtggcttgattgcttaaactattgacttggtaagtctactgtatataacatctaatatatatatattataggccagctacaaggggtttaaatatttaggattgtgtcttgaaaactaagtattggagtggattttcttctgctttcattgatacttgtcagaaaaaaatattagaccaaaatgtaaaatataagtaataattctcatgaaa

SEQ ID NO: 198 - DNA, 817 bp, Homo sapiens
agtcctgcgtccgggccccgaggcgcagcagggcaccaggtggagcaccagctacgcgtggcgcagcgcagcgtccctagcaccgagcctcccgcagccgccgagatgctgcgaacagagagctgccgccccaggtcgcccgccggacaggtggccgcggcgtccccgctcctgctgctgctgctgctgctcgcctggtgcgcgggcgcctgccgaggtgctccaatattacctcaaggattacagcctgaacaacagctacagttgtggaatgagatagatgatacttgttcgtcttttctgtccattgattctcagcctcaggcatccaacgcactggaggagctttgctttatgattatgggaatgctaccaaagcctcaggaacaagatgaaaaagataatactaaaaggttcttatttcattattcgaagacacagaagttgggcaagtcaaatgttgtgtcgtcagttgtgcatccgttgctgcagctcgttcctcacctgcatgagagaagaatgaagagattcagagtggacgaagaattccaaagtccctttgcaagtcaaagtcgaggatattttttattcaggccacggaatggaagaaggtcagcagggttcatttaaaatggatgccagctaattttccacagagcaatgctatggaatacaaaatgtactgacattttgttttcttctgaaaaaaatccttgctaaatgtactctgttgaaaatccctgtgttgtcaatgttctcagttgtaacaatgttgtaaatgttcaatttgttgaaaattaaaaaatctaaaaataaa

SEQ ID NO: 199 - DNA, 1482 bp, Homo sapiens
  misc_feature (33)..(33): n is a, c, g, or t
  misc_feature (1427)..(1427): n is a, c, g, or t
  misc_feature (1429)..(1429): n is a, c, g, or t
  misc_feature (1435)..(1435): n is a, c, g, or t
  misc_feature (1453)..(1453): n is a, c, g, or t
cggagaagagtgtgtaacgtggtgggggcttcntcggtggcgggcatggaggcttcgcgctgccggctcagtcccagcggcgacagtgtcttccatgaagaaatgatgaagatgcgacaggctaagctggattatcagaggctactacttgagaagaggcaaaggaaaaagcgccttgagccatttatggtgcagcccaatccagaagccaggctacgtcgggcaaagccaagggccagtgatgagcagactcccttggtgaactgtcatactccccacagcaatgtcatcttacatggtattgatggtccagctgctgtcctgaaaccagacgaagttcatgctccatcagtaagctcctctgttgtggaagaagatgctgaaaacaccgtggatactgcttccaagccaggacttcaggagcgtctccaaaagcatgatatctctgaaagtgtgaacttcgatgaggagactgatggaatatcccagtcagcatgtttagaaagacccaattctgcatcaagccagaattcaaccgatacaggcattccggttctgctactgccgcccaaccagctgataaccttcctgggagacatagacgacctggaggactttgtgttagtccctgcccctcaaggtgtcacagtaagatgtcggataatccgggataaaaggggaatggatcggggtcttttttcccacctactatatgtacttggaaaagaagaaaatcagaagatatttcttcttgcagctagaaagcggaaaaagagcaaaacagccaactaccttatctccattgatccagttgatttatctcgtgaaggagaaagttatgtcggcaagcttagatccaacctcatggggaccaagtttacagtttatgaccgtggcatctgccccatgaagggccggggtttggtaggagcggcccacacccggcaggagctggctgccatctcctatgaaacaaacgtacttggatttaaaggtcctaggaaaatgtctgtgatcattcctggaatgacactgaatcataagcagatcccctatcagccacaaaacaaccatgacagtttgctctcaaggtggcagaacagaactatggaaaatctggttgagctgcacaacaaggcccccgtctggaacagtgacactcagtcctatgtcctcaacttccgtggccgggtcactcaggcgtctgtgaagaacttccagctagtccacaaaaatgaccctgattatatagtcatgcagtttggacgtgtggcagatgacgtgttcacactggattacaactacccactttgtgcagtacaagcctttgccatctccctttctagctttgacagtaagctggcgtgtgaatgagagaacagtcaggcagggagcccttctccccacagagctttcaggagcagacntnggccgnccgacctgccagggcggncgccaaaaccctatagtgagattaatccc

SEQ ID NO: 200 - DNA, 6034 bp, Homo sapiens
ccacgcgtccggagctggaggaggcggcgggcgcgagacccggaatgcgcagggcccccgcctcgccccccccagcccgggccgcggcccccgccttccccgcagtcgtcccgcactcggtgcccgccccccgaggccggcggctgctcccactcggggccgttgctgcttgtgccgtgagcgccgcccagccattgtccccgtcgctccgtcagccgcgccggaccgcgcaccaggaggcgagagcgcgcatggggagcctctgttgatgccgccgccgcgccgccctccgaggctgcgtcccgggaagcccggctccccgagcgctccggcctggcccggtgccccggacctgagtgcgtccccatggaggcgcccgggctggcccaggcggccgcggcggagagcgactcccgcaaggtggcggaggagacccccgacggggcgcccgcgctctgccccagccctgaggcgctgtcgccggagccgcctgtgtacagcctgcaggactttgacacgctggccaccgtgggcactgggacgttcgggcgggtgcacctggtgaaggagaagacagccaagcatttcttcgccctcaaggtgatgagcattcctgacgtcatccgcctaaagcaggagcaacacgtacacaatgagaagtctgtcctgaaggaagtcagccacccgttcctcatcaggctgttctggacgtggcatgacgagcgcttcctctacatgctcatggagtacgtgccgggcggcgagctcttcagctacctgcgcaaccgggggcgcttctccagcaccacggggctcttctactctgcagagatcatctgtgccatcgagtacctgcactccaaagagatcgtctacagggacttgaagccagagaacatcctgctggatagggatggccacattaagctcacggactttgggttcgccaagaagctggtagacaggacttggaccctctgtggaacacccgagtacctagcccccgaagtcattcagagcaagggccacggaagggccgtggactggtgggccctcggcatcctgatattcgagatgctttcggggtttcctccgttttttgatgacaacccgtttggcatttatcagaaaattcttgcaggcaaaatagatttccccagacatttggatttccatgtaaaagacctcattaagaaactgctcgtggttgacagaacaaggcgattaggaaacatgaagaacggggcgaatgatgtgaagcatcatcggtggttccgctccgtggactgggaagctgttccgcagagaaaactgaagcctcccatcgtgcccaagatagctggtgacggcgacacttccaacttcgaaacttaccctgagaatgactgggacacagccgcgcccgtgccgcagaaggatttagaaatcttcaagaatttctgaggacaggagctcacatctggaagaaacaggaagattggaatctgcctggaacaaagaactgcacctaagcagaccagaagcaaaatgtcttcttcacggcataaggacatctccacttttctctgtacctgtgtgtatagaaatagattagagcacagttgaaattcatggaactggcattatttaagcaactggaattccacactgtaggaaggttttgaaaattgtttggttgtagattttatcttatcctttagtgttgtgttcctactgtgatgtcttggtttttgtcatagacttaagtttataagtttgaactggacttgttcgattataaccacaaattgtgtgtgtgtgtgtgtgtgtgtgtgtgtgtgtgtgtatgcctgtgtgtatatatagaagtcattatggcagatgcacagaaattgtgcagtgatgtaaatgttcatactttacagagcctataatttttatttttcaatttgttttttcaaaaatctcttctcggggacaacatctgaagggtatgttgcatgcattaaaaaaaatcatctcacatgcattttatagttttggggaagaaaatatcatggggaggtctaccttcagtatctttagttcttcttaccgggtaacttgagactttaaaagaagaaacaaagaggggaagatatgggagcgaatttattccaagaatctacaatgacattgaagttgttggaggaatgtactgtatttaaaaaaaccttctgtgacacattcaaaaatttcatctgagctggatgcagtggcttgttcctatagtcccagcactttgggaggctgaggtgggtggattgcttgagcccaggagttggagaccagtctgggaaacgtggtgagacctcatctctacaaaatacaaaaaaattagccgggcatggtggcacgtgagttaggtctcagctactcaggaggctgagatgagaggatcacttgagcctggggaggtccaggccgcagtgatccgagatcacaccactgcattccagcctgggtgacagagtgagaccctgtccaaaaaaaaaaaaaaaaaaaagaaggcaatggctttgtgcttttgaagatggattgaagagaacgtccaccttaaggctttaaaagacagtgaagctgggtgcggtggtgcactcctgtaaccctgggactttgggaagctgaggcaggaagattgagcctaggagttcgagactgacctgggcagcatagcgagaccccatctctatataaaaaaaaagatgttaaaacagtgaaattacagaaacagaacatagccaccctttttcatcagtgaccttttcttcacgtggaggtcaactcagtaggtgagaataattagtaggttcagcagaataaactctttacaattaataactcagtggaaaatgatgttcagatggtgaaatgtggaaatgttttagacaactctattttcagcctgtgcttctcactcaccatcctgttgggattaacagttgagggccatcgctgcctaaacatttagcgtgcggtttcccatcagttttaccgtgaatgtgaaaaggtgaaactggtgctgacttcggcagcaggtatactaaaattggaatgacacagaggagattagcatggccccctgcgcgaggaagatctgcagattcatgcagcattccatatttttttaagaaaaggttacactgtgcaccgacatgtggagctagaaggaaaagcttttaagtctcatgtttgctgactataaaaataaatcatagtaataatattgaacattctactttaaaaattattaataaaaccataaatgaaacacttgagcacactttaaaaagtacataaatccatgagtccatatgcctatttttaggttgtctgttttattatccaggatttcatactcagatgagaattagcatcaggaaagcctgaaatgccttaattgtgaactgatatgcaggaaaatgaaatatgcaagcacattggtgaccttgttctttacagacgtcgtgatcagcctccagccatacagaacaaatgagaaattagaagcgattccaagaacgtgtgatggtgtgaacccactttggaccatcacacacatttcagcatttgaagtgacacaagctacctggtaactgcccatggcggggtcatagtttaaatggcccaatgtcatgtagaggttaatttaatcaaaatgagctataaacatggagcaatcactgtataattttaaaatagtttacctggccaggcatggtcgtcacgcctgtaatcccagcactttgggaggccgaggcaggtggatcacctgaggtcaggagttcgagaccagcctggccaacatggcaaaacccccgtctctactaaaatacaaaaattaggtgtggtggcgggcacctgtaatcctggctactcgggaggctgaggcaggagaatcgcttgaacccgggaggcagaggctgcagtgagccgagatcgtgccactgcactccagcctgggccacagagcaagactccgtctcaaaacataaaaataaaaaaaatacaaatagctgacccgggtgggcattccaaaatgtccgcatggacgatcacgaaacaatcacggtgcgaaatgtccgcatggatgatcacgaaacaatcacggtgcggaatgtccgtatggatgatcatgacaaacaatcactgcgcaaaatgtggaggaaaattcattaccataatcacaacatttgtatcagaaaaacattacaaatttactttgcttcatgtaattttacgagttggcaatattttcttaaattggaatactctaagagaataggacatggatatgttacaagaagaagtgtattggggcaagtcttgtttttctgaagggaaatgccaccggcctgctttcataggcattgataaagccaggaaggaaataaagtcacaaccaaatagtatacactgtctctactgaattcttctaattccttcgcaacagaagtctaaatcctgcttagcctaaacatatctatagccagcgatgggcaaattatatttgctgtcagcatgatagaataagaagcagaaaccccccagcagtggggtaagattgcgcgcttcatcccctcaaaatgcagctcagccccactccctctccatgcccatcaaacaactgcacaatcacttgttactgaatttcccattcagcgttttgtttctttctgtccatacttaaagaccaaatcatttgtttgctttgaagaaaaagcaaaaacaagaacaaaaacaccaaatcatttgaaatcactgtccattaaaaaaaatcaccagtggaactaaacagttgagtggtttgggatgtgttcgccatttctgtgtttgacctacatggcctgtaattctttggaccattgtaactgtgaactatggcttaatactgttaaagaccccaaggctccactctgtagccaggtgcacctcaggctgcacaaataccccaccagaatgtcacaatcattcattgctccagctactgagtgaacagggtgcaagacagcactggcttgggttgtatttttgcagccagttaactttgcatcaggtctacacagtccttgcagcctttgatttctccagttgtagagatttgaaatggggtgcccgggttgctctcgtttttccttcaagctacctagcatgcattttacacacattggaggagtcgtatgcactgtttttctgttgctgatggaggcaagcaggccttctaattagtctaagttaaacggatgggattcacttaagaaaagcaagaagaaaagcacacgaacaggtgtcttaatgcatttggatagtttctttgcggggtgtgtgtgtgtgtgtgtgtgtgtgtgtgtgtgtgtgtgtcttggtgaaggtgaggggctgtattttcaccaagccttttcataatcaagtttgctttgcaaaccttatggccttgcaccccgcagaacagtcccttcctaatagcagggatgctctgtcatggtttttctgtaaattatcgtgtgttgggaagttctgttgaggcttagtttgatcttccatggtggacacgtctgttctgtatgtaaaaggcattacaattgtgttttagcagatgagacttgaagcctttccacagtccttgtgctctgagatggctgttgagctctgctcaactgtcgtagctgaattctttctttgcgctgaacactgggcagcctcaccatgttgccaacgtgcttctggggcccctgtcactgccgctggatgccgcgcacacaggcagagtgccttggcaggtttgtgcaccccttggcgagccagaactgggaaccccgcggggtgaccccttctcatggggggtcggggaggggagtgcctatttttaatcctgtctgtttgttgcacaatggaaatcactgtgatttgtacatatgccctaggaaaattttactgctgtctaatttatgtaataatactgttgattccaggtttatttaataaaactttgtatcttttcagaaaaaaaaaaaaa

SEQ ID NO: 201 - DNA, 555 bp, Homo sapiens
acgatgcgcgagtacaaagtggtggtgctgggctcgggcggggtaggcaaatccgccctgaccgtgcagttcgtgaccggcaccttcatcgagaaatacgaccccaccatcgaggacttctaccgcaaggagatcgaggtggattcgtcgccgtcggtgctggagatcctggacacggcgggcaccgagcagttcgcgtccatgcgggacctgtacatcaagaacggccagggcttcatcctcgtctacagcctcgtcaaccagcagagcttccaggacatcaagcccatgcgggaccagatcatccgcgtgaagcggtatgagaaagtgccagtcatcttggttgggaacaaagtggacctggaaagtgagagagaagtatcgtccagcgaaggcagagcccttgctgaagagtggggctgcccctttatggaaacttccgctaagagtaaaacaatggtggacgaactctttgcagaaattgtgaggcagatgaactatgctgctcagcctgacaaagatgacccatgctgttctgcatgtaacatacaatag

SEQ ID NO: 202 - protein, 589 aa, Homo sapiens
VATAAAVAPAPAPGTDSASSVHWFRKGLRLHDNPALLAAVRGARCVRCVYILDPWFAASSSVGINRWRFLLQSLEDLDTSLRKLNSRLFVVRGQPADVFPRLFKEWGVTRLTFEYDSEPFGKERDAAIMKMAKEAGVEVVTENSHTLYDLDRIIELNGQKPPLTYKRFQAIISRMELPKKPVGLVTSQQMESCRAEIQENHDETYGVPSLEELGFPTEGLGPAVWQGGETEALARLDKHLERKAWVANYERPRMNANSLLASPTGLSPYLRFGCLSCRLFYYRLWDLYKKVKRNSTPPLSLFGQLLWREFFYTAATNNPRFDRMEGNPICIQIPWDRNPEALAKWAEGKTGFPWIDAIMTQLRQEGWIHHLARHAVACFLTRGDLWVSWESGVRVFDELLLDADFSVNAGSWMWLSCSAFFQQFFHCYCPVGFGRRTDPSGDYIRRYLPKLKAFPSRYIYEPWNAPESIQKAAKCIIGVDYPRPIVNHAETSRLNIERMKQIYQQLSRYRGLCLLASVPSCVEDLSHPVAEPSSSQAGSMSSAGPRPLPSGPASPKRKLEAAEEPPGEELSKRARVAELPTPELPSKDA

SEQ ID NO: 203 - protein, 429 aa, Homo sapiens
MARGLGGPHWVAVGLLTWATLGLLVAGLGGHDDLHDDLQEDFHGHSHRHSHEDFHHGHSHAHGHGHTHESIWHGHTHDHDHGHSHEDLHHGHSHGYSHESLYHRGHGHDHEHSHGGYGESGAPGIKQDLDAVTLWAYALGATVLISAAPFFVLFLIPVESNSPRHRSLLQILLSFASGGLLGDAFLHLIPHALEPHSHHTLEQPGHGHSHSGQGPILSVGLWVLSGIVAFLVVEKFVRHVKGGHGHSHGHGHAHSHTRGSHGHGRQERSTKEKQSSEEEGKETRGVQKRRGGSTVPKDGPVRPQNAEEEKRGLDLRVSGYLNLAADLAHNFTDGLAIGASFRGGRGLGILTTMTVLLHEVPHEVGDFAILVQSGCTKKQAMRLQLLTAVGALAGTAVPFSLKEEQWTVKLQVVQVLAGSCHLLQVALST

SEQ ID NO: 204 - protein, 396 aa, Homo sapiens
MVAGTRCLLALLLPQVLLGGAAGLVPELGRRKFAAASSGRPSSQPSDEVLSEFELRLLSMFGLKQRPTPSRDAVVPPYMLDLYRRHSGQPGSPAPDHRLERAASRANTVRSFHHEESLEELPETSGKTTRRFFFNLSSIPTEEFITSAELQVFREQMQDALGNNSSFHHRINIYEIIKPATANSKFPVTRLLDTRLVNQNASRWESFDVTPAVMRWTAQGHANHGFVVEVAHLEEKQGVSKRHVRISRSLHQDEHSWSQIRPLLVTFGHDGKGHPLHKREKRQAKHKQRKRLKSSCKRHPLYVDFSDVGWNDWIVAPPGYHAFYCHGECPFPLADHLNSTNHAIVQTLVNSVNSKIPKACCVPTELSAISMLYLDENEKVVLKNYQDMVVEGCGCR

SEQ ID NO: 205 - protein, 1166 aa, Homo sapiens
MDGRTPRPQDAPARRKPKAKAPLPPAETKYTDVSSAADSVESTAFIMEQKENMIDKDVELSVVLPGDIIKSTTVHGSKPMMDLLIFLCAQYHLNPSSYTIDLLSAEQNHIKFKPNTPIGMLEVEKVILKPKMLDKKKPTPIIPEKTVRVVINFKKTQKTIVRVSPHASLQELAPIICSKCEFDPLHTLLLKDYQSQEPLDLTKSLNDLGLRELYAMDVNRESCQISQNLDIMKEKENKGFFSFFQRSKKKRDQTASAPATPLVNKHRPTFTRSNTISKPYISNTLPSDAPKKRRAPLPPMPASQSVPQDLAHIQERPASCIVKSMSVDETDKSPCEAGRVRAGSLQLSSMSAGNSSLRRTKRKAPSPPSKIPPHQSDENSRVTALQPVDGVPPDSASEANSPEELSSPETFHPGLSSQEQCTAPKLMEETSVFECPGTPEAAITSLTSGISSDYSLEEIDEKEELSEVPKVEAENISPKSQDIPFVSTDIINTLKNDPDSALGNGSGEFSQNSMEEKQETKSTDGQEPHSVVYDTSNGKKVVDSIRNLKSLGPNQENVQNEIIVYPENTEDNMKNGVKKTEINVEGVAKNNNIDMEVERPSNSEAHETDTAISYKENHLAASSVPDQKLNQPSAEKTKDAAIQTTPSCNSFDGKHQDHNLSDSKVEECVQTSNNNISTQHSCLSSQDSVNTSREFRSQGTLIIHSEDPLTVKDPICAHGNDDLLPPVDRIDKNSTASYLKNYPLYRQDYNPKPKPSNEITREYIPKIGMTTYKIVPPKSLEISKDWQSETIEYKDDQDMHALGKKHTHENVKETAIQTEDSAISESPEEPLPNLKPKPNLRTEHQVPSSVSSPDDAMVSPLKPAPKMTRDTGTAPFAPNLEEINNILESKFKSRASNAQAKPSSFFLQMQKRVSGHYVTSAAAKSVHAAPNPAPKELTNKEAERDMLPSPEQTLSPLSKMPHSVPQPLVEKTDDDVIGQAPAEASPPPIAPKPVTIPASQVSTQNLKTLKTFGAPRPYSSSGPSPFALAVVKRSQSFSKERTESPSASALVQPPANTEEGKTHSVNKFVDIPQLGVSDKENNSAHNEQNSQIPTPTDGPSFTVMRQSSLTFQSSDPEQMRQSLLTAIRSGEAAAKLKRVTIPSNTISVNGRSRLSHSMSPDAQDGH

SEQ ID NO: 206 - protein, 543 aa, Homo sapiens
MGTSLSPNDPWPLNPLSIQQTTLLLLLSVLATVHVGQRLLRQRRRQLRSAPPGPFAWPLIGNAAAVGQAAHLSFARLARRYGDVFQIRLGSCPIVVLNGERAIHQALVQQGSAFADRPAFASFRVVSGGRSMAFGHYSEHWKVQRRAAHSMMRNFFTRQPRSRQVLEGHVLSEARELVALLVRGSADGAFLDPRPLTVVAVANVMSAVCFGCRYSHDDPEFRELLSHNEEFGRTVGAGSLVDVMPWLQYFPNPVRTVFREFEQLNRNFSNFILDKFLRHCESLRPGAAPRDMMDAFILSAEKKAAGDSHGGGARLDLENVPATITDIFGASQDTLSTALQWLLLLFTRYPDVQTRVQAELDQVVGRDRLPCMGDQPNLPYVLAFLYEAMRFSSFVPVTIPHATTANTSVLGYHIPKDTVVFVNQWSVNHDPVKWPNPENFDPARFLDKDGLINKDLTSRVMIFSVGKRRCIGEELSKMQLFLFISILAHQCDFRANPNEPAKMNFSYGLTIKPKSFKVNVTLRESMELLDSAVQNLQAKETCQ

SEQ ID NO: 207 - protein, 212 aa, Homo sapiens
MNIFRLTGDLSHLAAIVILLLKIWKTRSCAGISGKSQLLFALVFTTRYLDLFTSFISLYNTSMKVIYLACSYATVYLIYLKFKATYDGNHDTFRVEFLVVPVGGLSFLVNHDFSPLEILWTFSIYLESVAILPQLFMISKTGEAETITTHYLFFLGLYRALYLVNWIWRFYFEGFFDLIAVVAGVVQTILYCDFFYLYITKVLKGKKLSLPA

SEQ ID NO: 208 - protein, 211 aa, Homo sapiens
MQSAMFLAVQHDCRPMDKSAGSGHKSEEKREKMKRTLLKDWKTRLSYFLQNSSTPGKPKTGKKSKQQAFIKPSPEEAQLWSEAFDELLASKYGLAAFRAFLKSEFCEENIEFWLACEDFKKTKSPQKLSSKARKIYTDFIEKEAPKEINIDFQTKTLIAQNIQEATSGCFTTAQKRVYSLMENNSYPRFLESEFYQDLCKKPQITTEPHAT

SEQ ID NO: 209 - protein, 384 aa, Homo sapiens
MDCSNGSAECTGEGGSKEVVGTFKAKDLIVTPATILKEKPDPNNLVFGTVFTDHMLTVEWSSEFGWEKPHIKPLQNLSLHPGSSALHYAVELFEGLKAFRGVDNKIRLFQPNLNMDRMYRSAVRATLPVFDKEELLECIQQLVKLDQEWVPYSTSASLYIRPAFIGTEPSLGVKKPTKALLFVLLSPVGPYFSSGTFNPVSLWANPKYVRAWKGGTGDCKMGGNYGSSLFAQCEDVDNGCQQVLWLYGRDHQITEVGTMNLFLYWINEDGEEELATPPLDGIILPGVTRRCILDLAHQWGEFKVSERYLTMDDLTTALEGNRVREMFSSGTACVVCPVSDILYKGETIHIPTMENGPKLASRILSKLTDIQYGREESDWTIVLS

SEQ ID NO: 210 - protein, 385 aa, Homo sapiens
DPDMELREEAWSPGPLDSEDQQMASHENPVDILIMDDDDVPSWPPTKLSPPQSAPPAGPPPRPRPPAPYICNECGKSFSHWSKLTRHQRTHTGERPNACADCGKTFSQSSHLVQHRRIHTGEKPYACLECGKRFSWSSNLMQHQRIHTGEKPYTCPDCGRSFTQSKSLAKHRRSHSGLKPFVCPRCGRGFSQPKSLARHLRLHPELSGPGVAAKVLAASVRRAKGPEEAVAADGEIAIPVGDGEGIIVVGAPGEGAAAAAAMAGAGAKAAGPRSRRAPAPKPYVCLECGKGFGHGAGLLAHQRAQHGDGLGAAGGEEPAHICVECGEGFVQGAALRRHKKIHAVGAPSVCSSCGQSYYRAGGEEEDDDDEAAGGRCPECRAGEGR

SEQ ID NO: 211 - protein, 542 aa, Homo sapiens
MDLGAITKYSALHAKPNGLILQYGTAGFRTKAEHLDHVMFRMGLLAVLRSKQTKSTIGVMVTASHNPEEDNGVKLVDPLGEMLAPSWEEHATCLANAEEQDMQRVLIDISEKEAVNLQQDAFVVIGRDTRPSSEKLSQSVIDGVTVLGGQFHDYGLLTTPQLHYMVYCRNTGGRYGKATIEGYYQKLSKAFVELTKQASCSGDEYRSLKVDCANGIGALKLREMEHYFSQGLSVQLFNDGSKGKLNHLCGADFVKSHQKPPQGMEIKSNERCCSFDGDADRIVYYYHDADGHFHLIDGDKIATLISSFLKELLVEIGESLNIGVVQTAYANGSSTRYLEEVMKVPVYCTKTGVKHLHHKAQEFDIGVYFEANGHGTALFSTAVEMKIKQSAEQLEDKKRKAAKMLENIIDLFNQAAGDAISDMLVIEAILALKGLTVQQWDALYTDLPNRQLKVQVADRRVISTTDAERQAVTPPGLQEAINDLVKKYKLSRAFVRPSGTEDVVRVYAEADSQESADHLAHEVSLAVFQLAGGIGERPQPGF

SEQ ID NO: 212 - protein, 638 aa, Homo sapiens
MLDFFTIFSKGGLVLWCFQGVSDSCTGPVNALIRSVLLQERGGNNSFTHEALTLKYKLDNQFELVFVVGFQKILTLTYVDRLIDDVHRLFRDKYRTEIQQQSALSLLNGTFDFQNDFLRLLREAEESSKIRAPTTMKKFEDSEKAKKPVRSMIETRGEKPKEKAKNSKKKGAKKEGSDGPLATSKPVPAEKSGLPVGPENEVELSKEELIRRKREEFIQKHGRGMEKSNKSTKSDAPKEKGKKAPRVWELGGCANKEVLDYSTPTTNGTPEAALSEDINLIRGTGSGGQLQDLDCSSSDDEGAAQTLTKPSATKGTLGGMFGMLKGLVGSKSLSREDMESVLDKMRDHLIAKNVAADIAVQLCESVANKLEGKVMGTFSTVTSTVKQALQESLVQILQPQRRVDMLRDIMDAQRRQRPYVVTFCGVNGVGKSTNLAKISFWLLENGFSVLIAACDTFRAGAVEQLRTHTRRLSALHPPEKHGGRTMVQLFEKGYGKDAAGIAMEAIAFARNQGFDVVLVDTAGRMQDNAPLMTALAKLITVNTPDLVLFVGEALVGNEAVDQLVKFNRALADHSMAQTPRLIDGIVLTKFDTIDDKVGAAISMTYITSKPIVFVGTGQTYCDLRSLNAKAVVAALMKA

SEQ ID NO: 213 - protein, 387 aa, Homo sapiens
MSTFFSDTAWICLAVPTVLCGTVFCKYKKSSGQLWSWMVCLAGLCAVCLLILSPFWGLILFSVSCFLMYTYLSGQELLPVDQKAVLVTGGDCGLGHALCKYLDELGFTVFAGVLNENGPGAEELRRTCSPRLSVLQMDITKPVQIKDAYSKVAAMLQDRGLWAVINNAGVLGFPTDGELLLMTDYKQCMAVNFFGTVEVTKTFLPLLRKSKGRLVNVSSMGGGAPMERLASYGSSKAAVTMFSSVMRLELSKWGIKVASIQPGGFLTNIAGTSDKWEKLEKDILDHLPAEVQEDYGQDYILAQRNFLLLINSLASKDFSPVLRDIQHAILAKSPFAYYTPGKGAYLWICLAHYLPIGIYDYFAKRHFGQDKPMPRALRMPNYKKKAT

SEQ ID NO: 214 - protein, 4544 aa, Homo sapiens
MLTPPLLLLLPLLSALVAAAIDAPKTCSPKQFACRDQITCISKGWRCDGERDCPDGSDEAPEICPQSKAQRCQPNEHNCLGTELCVPMSRLCNGVQDCMDGSDEGPHCRELQGNCSRLGCQHHCVPTLDGPTCYCNSSFQLQADGKTCKDFDECSVYGTCSQLCTNTDGSFICGCVEGYLLQPDNRSCKAKNEPVDRPPVLLIANSQNILATYLSGAQVSTITPTSTRQTTAMDFSYANETVCWVHVGDSAAQTQLKCARMPGLKGFVDEHTINISLSLHHVEQMAIDWLTGNFYFVDDIDDRIFVCNRNGDTCVTLLDLELYNPKGIALDPAMGKVFFTDYGQIPKVERCDMDGQNRTKLVDSKIVFPHGITLDLVSRLVYWADAYLDYIEVVDYEGKGRQTIIQGILIEHLYGLTVFENYLYATNSDNANAQQKTSVIRVNRFNSTEYQVVTRVDKGGALHIYHQRRQPRVRSHACENDQYGKPGGCSDICLLANSHKARTCRCRSGFSLGSDGKSCKKPEHELFLVYGKGRPGIIRGMDMGAKVPDEHMIPIENLMNPRALDFHAETGFIYFADTTSYLIGRQKIDGTERETILKDGIHNVEGVAVDWMGDNLYWTDDGPKKTISVARLEKAAQTRKTLIEGKMTHPRAIVVDPLNGWMYWTDWEEDPKDSRRGRLERAWMDGSHRDIFVTSKTVLWPNGLSLDIPAGRLYWVDAFYDRIETILLNGTDRKIVYEGPELNHAFGLCHHGNYLFWTEYRSGSVYRLERGVGGAPPTVTLLRSERPPIFEIRMYDAQQQQVGTNKCRVNNGGCSSLCLATPGSRQCACAEDQVLDADGVTCLANPSYVPPPQCQPGEFACANSRCIQERWKCDGDNDCLDNSDEAPALCHQHTCPSDRFKCENNRCIPNRWLCDGDNDCGNSEDESNATCSARTCPPNQFSCASGRCIPISWTCDLDDDCGDRSDESASCAYPTCFPLTQFTCNNGRCININWRCDNDNDCGDNSDEAGCSHSCSSTQFKCNSGRCIPEHWTCDGDNDCGDYSDETHANCTNQATRPPGGCHTDEFQCRLDGLCIPLRWRCDGDTDCMDSSDEKSCEGVTHVCDPSVKFGCKDSARCISKAWVCDGDNDCEDNSDEENCESLACRPPSHPCANNTSVCLPPDKLCDGNDDCGDGSDEGELCDQCSLNNGGCSHNCSVAPGEGIVCSCPLGMELGPDNHTCQIQSYCAKHLKCSQKCDQNKFSVKCSCYEGWVLEPDGESCRSLDPFKPFIIFSNRHEIRRIDLHKGDYSVLVPGLRNTIALDFHLSQSALYWTDVVEDKIYRGKLLDNGALTSFEVVIQYGLATPEGLAVDWIAGNIYWVESNLDQIEVAKLDGTLRTTLLAGDIEHPRAIALDPRDGILFWTDWDASLPRIEAASMSGAGRRTVHRETGSGGWPNGLTVDYLEKRILWIDARSDAIYSARYDGSGHMEVLRGHEFLSHPFAVTLYGGEVYWTDWRTNTLAKANKWTGHNVTVVQRTNTQPFDLQVYHPSRQPMAPNPCEANGGQGPCSHLCLINYNRTVSCACPHLMKLHKDNTTCYEFKKFLLYARQMEIRGVDLDAPYYNYIISFTVPDIDNVTVLDYDAREQRVYWSDVRTQAIKRAFINGTGVETVVSADLPNAHGLAVDWVSRNLFWTSYDTNKKQINVARLDGSFKNAVVQGLEQPHGLVVHPLRGKLYWTDGDNISMANMDGSNRTLLFSGQKGPVGLAIDFPESKLYWISSGNHTINRCNLDGSGLEVIDAMRSQLGKATALAIMGDKLWWADQVSEKMGTCSKADGSGSVVLRNSTTLVMHMKVYDESIQLDHKGTNPCSVNNGDCSQLCLPTSETTRSCMCTAGYSLRSGQQACEGVGSFLLYSVHEGIRGIPLDPNDKSDALVPVSGTSLAVGIDFHAENDTIYWVDMGLSTISRAKRDQTWREDVVTNGIGRVEGIAVDWIAGNIYWTDQGFDVIEVARLNGSFRYVVISQGLDKPRAITVHPEKGYLFWTEWGQYPRIERSRLDGTERVVLVNVSISWPNGISVDYQDGKLYWCDARTDKIERIDLETGENREVVLSSNNMDMFSVSVFEDFIYWSDRTHANGSIKRGSKDNATDSVPLRTGIGVQLKDIKVFNRDRQKGTNVCAVANGGCQQLCLYRGRGQRACACAHGMLAEDGASCREYAGYLLYSERTILKSIHLSDERNLNAPVQPFEDPEHMKNVIALAFDYRAGTSPGTPNRIFFSDIHFGNIQQINDDGSRRITIVENVGSVEGLAYHRGWDTLYWTSYTTSTITRHTVDQTRPGAFERETVITMSGDDHPRAFVLDECQNLMFWTNWNEQHPSIMRAALSGANVLTLIEKDIRTPNGLAIDHRAEKLYFSDATLDKIERCEYDGSHRYVILKSEPVHPFGLAVYGEHIFWTDWVRRAVQRANKHVGSNMKLLRVDIPQQPMGIIAVANDTNSCELSPCRINNGGCQDLCLLTHQGHVNCSCRGGRILQDDLTCRAVNSSCRAQDEFECANGECINFSLTCDGVPHCKDKSDEKPSYCNSRRCKKTFRQCSNGRCVSNMLWCNGADDCGDGSDEIPCNKTACGVGEFRCRDGTCIGNSSRCNQFVDCEDASDEMNCSATDCSSYFRLGVKGVLFQPCERTSLCYAPSWVCDGANDCGDYSDERDCPGVKRPRCPLNYFACPSGRCIPMSWTCDKEDDCEHGEDETHCNKFCSEAQFECQNHRCISKQWLCDGSDDCGDGSDEAAHCEGKTCGPSSFSCPGTHVCVPERWLCDGDKDCADGADESIAAGCLYNSTCDDREFMCQNRQCIPKHFVCDHDRDCADGSDESPECEYPTCGPSEFRCANGRCLSSRQWECDGENDCHDQSDEAPKNPHCTSPEHKCNASSQFLCSSGRCVAEALLCNGQDDCGDSSDERGCHINECLSRKLSGCSQDCEDLKIGFKCRCRPGFRLKDDGRTCADVDECSTTFPCSQRCINTHGSYKCLCVEGYAPRGGDPHSCKAVTDEEPFLIFANRYYLRKLNLDGSNYTLLKQGLNNAVALDFDYREQMIYWTDVTTQGSMIRRMHLNGSNVQVLHRTGLSNPDGLAVDWVGGNLYWCDKGRDTIEVSKLNGAYRTVLVSSGLREPRALVVDVQNGYLYWTDWGDHSLIGRIGMDGSSRSVIVDTKITWPNGLTLDYVTERIYWADAREDYIEFASLDGSNRHVVLSQDIPHIFALTLFEDYVYWTDWETKSINRAHKTTGTNKTLLISTLHRPMDLHVFHALRQPDVPNHPCKVNNGGCSNLCLLSPGGGHKCACPTNFYLGSDGRTCVSNCTASQFVCKNDKCIPFWWKCDTEDDCGDHSDEPPDCPEFKCRPGQFQCSTGICTNPAFICDGDNDCQDNSDEANCDIHVCLPSQFKCTNTNRCIPGIFRCNGQDNCGDGEDERDCPEVTCAPNQFQCSITKRCIPRVWVCDRDNDCVDGSDEPANCTQMTCGVDEFRCKDSGRCIPARWKCDGEDDCGDGSDEPKEECDERTCEPYQFRCKNNRCVPGRWQCDYDNDCGDNSDEESCTPRPCSESEFSCANGRCIAGRWKCDGDHDCADGSDEKDCTPRCDMDQFQCKSGHCIPLRWRCDADADCMDGSDEEACGTGVRTCPLDEFQCNNTLCKPLAWKCDGEDDCGDNSDENPEECARFVCPPNRPFRCKNDRVCLWIGRQCDGTDNCGDGTDEEDCEPPTAHTTHCKDKKEFLCRNQRCLSSSLRCNMFDDCGDGSDEEDCSIDPKLTSCATNASICGDEARCVRTEKAAYCACRSGFHTVPGQPGCQDINECLRFGTCSQLCNNTKGGHLCSCARNFMKTHNTCKAEGSEYQVLYIADDNEIRSLFPGHPHSAYEQAFQGDESVRIDAMDVHVKAGRVYWTNWHTGTISYRSLPPAAPPTTSNRHRRQIDRGVTHLNISGLKMPRGIAIDWVAGNVYWTDSGRDVIEVAQMKGENRKTLISGMIDEPHAIVVDPLRGTMYWSDWGNHPKIETAAMDGTLRETLVQDNIQWPTGLAVDYHNERLYWADAKLSVIGSIRLNGTDPIVAADSKRGLSHPFSIDVFEDYIYGVTYINNRVFKIHKFGHSPLVNLTGGLSHASDVVLYHQHKQPEVTNPCDRKKCEWLCLLSPSGPVCTCPNGKRLDNGTCVPVPSPTPPPDAPRPGTCNLQCFNGGSCFLNARRQPKCRCQPRYTGDKCELDQCWEHCRNGGTCAASPSGMPTCRCPTGFTGPKCTQQVCAGYCANNSTCTVNQGNQPQCRCLPGFLGDRCQYRQCSGYCENFGTCQMAADGSRQCRCTAYFEGSRCEVNKCSRCLEGACVVNKQSGDVTCNCTDGRVAPSCLTCVGHCSNGGSCTMNSKMMPECQCPPHMTGPRCEEHVFSQQQPGHIASILIPLLLLLLLVLVAGVVFWYKRRVQGAKGFQHQRMTNGAMNVEIGNPTYKMYEGGEPDDVGGLLDADFALDPDKPTNFTNPVYATLYMGGHGSRHSLASTDEKRELLGRGPEDEIGDPLA

SEQ ID NO: 215 - protein, 900 aa, Homo sapiens
GPGSRHHRARDRLIHFGAVSTDVLGCSAHCSLTQSPKMNIQEQGFPLDLGASFTEDAPRPPVPGEEGELVSTDPRPASYSFCSGKGVGIKGETSTATPRRSDLDLGYEPEGSASPTPPYLKWAESLHSLLDDQDGISLFRTFLKQEGCADLLDFWFACTGFRKLEPCDSNEEKRLKLARAIYRKYILDNNGIVSRQTKPATKSFIKGCIMKQLIDPAMFDQAQTEIQATMEENTYPSFLKSDIYLEYTRTGSESPKVCSDQSSGSGTGKGISGYLPTLNEDEEWKCDQDMDEDDGRDAAPPGRLPQKLLLETAAPRVSSSRRYSEGREFRYGSWREPVNPYYVNAGYALAPATSANDSEQQSLSSDADTLSLTDSSVDGIPPYRIRKQHRREMQESAQVNGRVPLPHIPRTYRVPKEVRVEPQKFAEELIHRLEAVQRTREAEEKLEERLKRVRMEEEGEDGDPSSGPPGPCHKLPPAPAWHHFPPRLCWTWACAGLRDAHEENPESILDEHVQRVLRTTGRQSPGPGHRSPDSGHVAKMPVALGGAASGHGKHVPKSGAKLDAAGLHHHRHVHHHVHHSTARPKEQVEAEATRRAQSSFAWGLEPHSHGARSRGYSESVGAAPNASDGLAHSGKVGVACKRNAKKAESGKSASTEVPGASEDAEKNQKIMQWIIEGEKEISRHRRTGHGSSGTRKPQPHENSRPLSLEHPWAGPQLRTSVQPSHLFIQDPTMPPHPAPNPLTQLEEARRRLEEEEKRASRAPSKQRYVQEVMRRGRACVRPACAPVLHVVPAVSDMELSETETRSQRKVGGGSAQPCDSIVVAYYFCGEPIPYRTLVRGRAVTLGQFKELLTKKGSYRYYFKKVSDEFDCGVVFEEVREDEAVLPVFEEKIIGKVEKVD

SEQ ID NO: 216 - protein, 835 aa, Homo sapiens [sequence omitted]

SEQ ID NO: 217 - protein, 548 aa, Homo sapiens
MKTPADTGFAFPDWAYKPESSPGSRQIQLWHFILELLRKEEYQGVIAWQGDYGEFVIKDPDEVARLWGVRKCKPQMNYDKLSRALRYYYNKRILHKTKGKRFTYKFNFNKLVLVNYPFIDVGLAGGAVPQSAPPVPSGGSHFRFPPSTPSEVLSPTEDPRSPPACSSSSSSLFSAVVARRLGRGSVSDCSDGTSELEEPLGEDPRARPPGPPDLGAFRGPPLARLPHDPGVFRVYPRPRGGPEPLSPFPVSPLAGPGSLLPPQLSPALPMTPTHLAYTPSPTLSPMYPSGGGGPSGSGGGSHFSFSPEDMKRYLQAHTQSVYNYHLSPRAFLHYPGLVVPQPQRPDKCPLPPMAPETPPVPSSASSSSSSSSSPFKFKLQRPPLGRRQRAAGEKAVAAADKSGGSAGGLAEGAGALAPPPPPPQIKVEPISEGESEEVEVTDISDEDEEDGEVFKTPRAPPAPPKPEPGEAPGASQCMPLKLRFKRRWSEDCRLEGGGGPAGGFEDEGEDKKVRGEGPGEAGGPLTPRRVSSDLQHATAQLSLEHRDS

SEQ ID NO: 218 - protein, 1985 aa, Homo sapiens
PGCAARLSRARAPGPGAAGAGRKRLADPGPPPASRRLRAPGSRPRLAPCTRRAAQPAHARMAPRAAGGAPLSARAAAASPPPFQTPPRCPVPLLLLLLLGAARAGALEIQRRFPSPTPTNNFALDGAAGTVYLAAVNRLYQLSGANLSLEAEAAVGPVPDSPLCHAPQLPQASCEHPRRLTDNYNKILQLDPGQGLVVVCGSIYQGFCQLRRRGNISAVAVRFPPAAPPAEPVTVFPSMLNVAANHPNASTVGLVLPPAAGAGGSRLLVGATYTGYGSSFFPRNRSLEDHRFENTPEIAIRSLDTRGDLAKLFTFDLNPSDDNILKIKQGAKEQHKLGFVSAFLHPSDPPPGAQSYAYLALNSEARAGDKESQARSLLARICLPHGAGGDAKKLTESYIQLGLQCAGGAGRGDLYSRLVSVFPARERLFAVFERPQGSPAARAAPAALCAFRFADVRAAIRAARTACFVEPAPDVVAVLDSVVQGTGPACERKLNIQLQPEQLDCGAAHLQHPLSILQPLKATPVFRAPGLTSVAVASVNNYTAVFLGTVNGRLLKINLNESMQVVSRRVVTVAYGEPVHHVMQFDPADSVYLYLMTSHQMARVKVAACNVHSTCGDCVGAADAYCGWCALETRCTLQQDCTNSSQQHFWTSASEGPSRCPAMTVLPSEIDVRQEYPGMILQISGSLPSLSGMEMACDYGNNIRTVARVPGPAFGHQIAYCNLLPRDQFPPFPPNQDHVTVEMSVRVNGRNIVKANFTIYDCSRTAQVYPHTACTSCLSAQWPCFWCSQQHSCVSNQSRCEASPNPTSPQDCPRTLLSPLAPVPTGGSQNILVPLANTAFFQGAALECSFGLEEIFEAVWVNESVVRCDQVVLHTTRKSQVFPLSLQLKGRPARFLDSPEPMTVMVYNCAMGSPDCSQCLGREDLGHLCMWSDGCRLRGPLQPMAGTCPAPEIRAIEPLSGPLDGGTLLTIRGRNLGRRLSDVAHGVWIGGVACEPLPDRYTVSEEIVCVTGPAPGPLSGVVTVNASKEGKSRDRFSYVLPLVHSLEPTMGPKAGGTRITIHGNDLHVGSELQVLVNDTDPCTELMRTDTSIACTMPEGALPAPVPVCVRFERRGCVHGNLTFWYMQNPVITAISPRRSPVSGGRTITVAGERFHMVQNVSMAVHHIGREPTLCKVLNSTLITCPSPGALSNASAPVDFFINGRAYADEVAVAEELLDPEEAQRGSRFRLDYLPNPQFSTAKREKWIKHHPGEPLTLVIHKEQDSLGLQSHEYRVKIGQVSCDIQIVSDRIIHCSVNESLGAAVGQLPITIQVGNFNQTIATLQLGGSETAIIVSIVICSVLLLLSVVALFVFCTKSRRAERYWQKTLLQMEEMESQIREEIRKGFAELQTDMTDLTKELNRSQGIPFLEYKHFVTRTFFPKCSSLYEERYVLPSQTLNSQGSSQAQETHPLLGEWKIPESCRPNMEEGISLFSSLLNNKHFLIVFVHALEQQKDFAVRDRCSLASLLTIALHGKLEYYTSIMKELLVDLIDASAAKNPKLMLRRTESVVEKMLTNWMSICMYSCLRETVGEPFFLLLCAIKQQINKGSIDAITGKARYTLNEEWLLRENIEAKPRNLNVSFQGCGMDSLSVRAMDTDTLTQVKEKILEAFCKNVPYSQWPRAEDVDLEWFASSTQSYILRDLDDTSVVEDGRKKLNTLAHYKIPEGASLAMSLIDKKDNTLGRVKDLDTEKYFHLVLPTDELAEPKKSHRQSHRKKVLPEIYLTRLLSTKGTLQKFLDDLFKAILSIREDKPPLAVKYFFDFLEEQAEKRGISDPDTLHIWKTNSLPLRFWVNILKNPQFVFDIDKTDHIDACLSVIAQAFIDACSISDLQLGKDSPTNKLLYAKEIPEYRKIVQRYYKQIQDMTPLSEQEMNAHLAEESRKYQNEFNTNVAMAEIYKYAKRYRPQIMAALEANPTARRTQLQHKFEQVVALMEDNIYECYSEA

SEQ ID NO: 219 - protein, 968 aa, Homo sapiens
MAEDDPYLGRPEQMFHLDPSLTHTIFNPEVFQPQMALPTDGPYLQILEQPKQRGFRFRYVCEGPSHGGLPGASSEKNKKSYPQVKICNYVGPAKVIVQLVTNGKNIHLHAHSLVGKHCEDGICTVTAGPKDMVVGFANLGILHVTKKKVFETLEARMTEACIRGYNPGLLVHPDLAYLQAEGGGDRQLGDREKELIRQAALQQTKEMDLSVVRLMFTAFLPDSTGSFTRRLEPVVSDAIYDSKAPNASNLKIVRMDRTAGCVTGGEEIYLLCDKVQKDDIQIRFYEEEENGGVWEGFGDFSPTDVHRQFAIVFKTPKYKDINITKPASVFVQLRRKSDLETSEPKPFLYYPEIKDKEEVQRKRQKLMPNFSDSFGGGSGAGAGGGGMFGSGGGGGGTGSTGPGYSFPHYGFPTYGGITFHPGTTKSNAGMKHGTMDTESKKDPEGCDKSDDKNTVNLFGKVIETTEQDQEPSEATVGNGEVTLTYATGTKEESAGVQDNLFLEKAMQLAKRHANALFDYAVTGDVKMLLAVQRHLTAVQDENGDSVLHLAIIHLHSQLVRDLLEVTSGLISDDIINMRNDLYQTPLHLAVITKQEDVVEDLLRAGADLSLLDRLGNSVLHLAAKEGHDKVLSILLKHKKAALLLDHPNGDGLNAIHLAMMSNSLPCLLLLVAAGADVNAQEQKSGRTALHLAVEHDNISLAGCLLLEGDAHVDSTTYDGTTPLHIAAGRGSTRLAALLKAAGADPLVENFEPLYDLDDSWENAGEDEGVVPGTTPLDMATSWQVFDILNGKPYEPEFTSDDLLAQGDMKQLAEDVKLQLYKLLEIPDPDKNWATLAQKLGLGILNNAFRLSPAPSKTLMDNYEVSGGTVRELVEALRQMGYTEAIEVIQAASSPVKTTSQAHSLPLSPASTRQQIDELRDSDSVCDTGVETSFRKLSFTESLTSGASLLTLNKMPHDYGQEGPLEGKI

SEQ ID NO: 220 - protein, 1431 aa, Homo sapiens
MTVFRQENVDDYYDTGEELGSGQFAVVKKCREKSTGLQYAAKFIKKRRTKSSRRGVSREDIEREVSILKEIQHPNVITLHEVYENKTDVILILELVAGGELFDFLAEKESLTEEEATEFLKQILNGVYYLHSLQIAHFDLKPENIMLLDRNVPKPRIKIIDFGLAHKIDFGNEFKNIFGTPEFVAPEIVNYEPLGLEADMWSIGVITYILLSGASPFLGDTKQETLANVSAVNYEFEDEYFSNTSALAKDFIRRLLVKDPKKRMTIQDSLQHPWIKPKDTQQALSRKASAVNMEKFKKFAARKKWKQSVRLISLCQRLSRSFLSRSNMSVARSDDTLDEEDSFVMKAIIHAINDDNVPGLQHLLGSLSNYDVNQPNKHGTPPLLIAAGCGNIQILQLLIKRGSRIDVQDKGGSNAVYWAARHGHVDTLKFLSENKCPLDVKDKSGEMALHVAARYGHADVAQVTCAASAQIPISRTKEEETPLHCAAWHGYYSVAKALCEAGCNVNIKNREGETPLLTASARGYHDIVECLAEHGADLNACDKDGHIALHLAVRRCQMEVIKTLLSQGCFVDYQDRHGNTPLHVACKDGNMPIVVALCEANCNLDISNKYGRTPLHLAANNGILDVVRYLCLMGASVEALTTDGKTAEDLARSEQHEHVAGLLARLRKDTHRGLFIQQLRPTQNLQPRIKLKLFGHSGSGKTTLVESLKCGLLRSFFRRRRPRLSSTNSSRFPPSPLASKPTVSVSINNLYPGCENVSVRSRSMMFEPGLTKGMLEVFVAPTHHPHCSADDQSTKAIDIQNAYLNGVGDFSVWEFSGNPVYFCCYDYFAANDPTSIHVVVFSLEEPYEIQLNPVIFWLSFLKSLVPVEEPIAFGGKLKNPLQVVLVATHADIMNVPRPAGGEFGYDKDTSLLKEIRNRFGNDLHISNKLFVLDAGASGSKDMKVLRNHLQEIRSQIVSVCPPMTHLCEKIISTLPSWRKLNGPNQLMSLQQFVYDVQDQLNPLASEEDLRRIAQQLHSTGEINIMQSETVQDVLLLDPRWLCTNVLGKLLSVETPRALHHYRGRYTVEDIQRLVPDSDVEELLQILDAMDICARDLSSGTMVDVPALIKTDNLHRSWADEEDEVMVYGGVRIVPVEHLTPFPCGIFHKVQVNLCRWIHQQSTEGDADIRLWVNGCKLANRGAELLVLLVNHGQGIEVQVRGLETEKIKCCLLLDSVCSTIENVMATTLPGLLTVKHYLSPQQLREHHEPVMIYQPRDFFRAQTLKETSLTNTMGGYKESFSSIMCFGCHDVYSQASLGMDIHASDLNLLTRRKLSRLLDPPDPLGKDWCLLAMNLGLPDLVAKYNTNNGAPKDFLPSPLHALLREWTTYPESTVGTLMSKLRELGRRDAADLLLKASSVFKINLDGNGQEAYASSCNSGTSYNSISSVVSR

SEQ ID NO: 221 - protein, 158 aa, Homo sapiens
MSHGKGTDMLPEIAAAVGFLSSLLRTRGCVSEQRLKVFSGALQEALTEHYKHHWFPEKPSKGSGYRCIRINHKMDPIISRVASQIGLSQPQLHQLLPSELTLWVDPYEVSYRIGEDGSICVLYEEAPLAASCGLLTCKNQVLLGRSSPSKNYVMAVSS

SEQ ID NO: 222 - protein, 1152 aa, Homo sapiens [sequence omitted]

SEQ ID NO: 223 - protein, 381 aa, Homo sapiens [sequence omitted]

SEQ ID NO: 224 - protein, 747 aa, Homo sapiens
DWVIPPINLPENSRGPFPQELVRIRSDRDKNLSLRYSVTGPGADQPPTGIFILNPISGQLSVTKPLDREQIARFHLRAHAVDINGNQVENPIDIVINVIDMNDNRPEFLHQVWNGTVPEGSKPGTYVMTVTAIDADDPNALNGMLRYRIVSQAPSTPSPNMFTINNETGDIITVAAGLDREKVQQYTLIIQATDMEGNPTYGLSNTATAVITVTDVNDNPPEFTAMTFYGEVPENRVDIIVANLTVTDKDQPHTPAWNAVYRISGGDPTGRFAIQTDPNSNDGLVTVVKPIDFETNRMFVLTVAAENQVPLAKGIQHPPQSTATVSVTVIDVNENPYFAPNPKIIRQEEGLHAGTMLTTFTAQDPDRYMQQNIRYTKLSDPANWLKIDPVNGQITTIAVLDRESPNVKNNIYNATFLASDNGIPPMSGTGTLQIYLLDINDNAPQVLPQEAETCETPDPNSINITALDYDIDPNAGPFAFDLPLSPVTIKRNWTITRLNGDFAQLNLKIKFLEAGIYEVPIIITDSGNPPKSNISILRVKVCQCDSNGDCTDVDRIVGAGLGTGAIIAILLCIIILLILVLMFVVWMKRRDKERQAKQLLIDPEDDVRDNILKYDEEGGGEEDQDYDLSQLQQPDTVEPDAIKPVGIRRMDERPIHAEPQYPVRSAAPHPGDIGDFINEGLKAADNDPTAPPYDSLLVFDYEGSGSTAGSLSSLNSSSSGGEQDYDYLNDWGPRFKKLADMYGGGDD

SEQ ID NO: 225 - protein, 126 aa, Homo sapiens
MPFFGNTFSPKKTPPRKSASLSNLHSLDRSTREVELGLEYGSPTMNLAGQSLKFENGQWIAETGVSGGVDRREVQRLRRRNQQLEEENNLLRLKVDILLDMLSESTAESHLMEKELDELRISRKRK

SEQ ID NO: 226 - protein, 1498 aa, Homo sapiens
VKDLGSLNGTFVNDMRIPDQKYVTLKLNDVIRFGYDSNMYVLERVQHRVPEEALKHEKYTSQLQVSVKGLAPKRSEALPEHTPYCEASNPRPEKGDRRPGTEAASYRTPLYGQPSWWGEDDGSTLPDAQRQGEPYPERPKGPVQQDGELHGFRAPAEPQGCSFRREPSYFEIPTKETPQPSQPPEVPAHEMPTKDAEAGGGGAAPVVQSHASFTIEFDDCSPGKMKIKDHITKFSLRQRRPPGKEATPGEMVSAETKVADWLVQNDPSLLHRVGPGDDRHSTKSDLPVHTRTLKGHKHEDGTQSDSEDPLAKAASAAGVPLEASGGQVRLQRQIKRDPQELLHNQQAFVIEFFDEDTPRKKRSQSFTHSPSGDPKADKRRGPTPADRDRPSVPAPVQAGGRSSGPQRAGSLKREKTEERLGSPSPASRTPARPFGSVGRRSRLAQDFMAQCLRESSPAARPSPEKVPPVLPAPLTPHGTSPVGPPTPPPAPTDPQLTKARKQEEDDSLSDAGTYTIETEAQDTEVEEARKMIDQVFGVLESPELSRASSATFRPVIRGDRDESDDGGVAQRMALLQEFASRPLGAAPQAEHQGLPVPGSPGGQKWVSRWASLADSYSDPGLTEDGLGRRGGEPEGSLPVRMRRRLPQLPSERADSPAGPESSRRSGPGPPELDSEQPSRLFGQEELDPDSLSDASGSDGGRGPEPGVEPQDSRRRSPQEGPTWSRGRRSPRAPGEPTPASFFIGDQNGDAVLSRKLLAAPGDGEGLGQTAQPSPPARDGVYVSANGRMVIQLRPGRSPEPDGPAPAFLRQESFTKEPASGPPAPGKPPHISSHPLLQDLAATRAARMDFHSQDTHLILKETETALAALEARLLSNSVDAECEGGSTPRPPEDALSGDSDVDTASTVSLRSGKSGPSPTTPQPLRAQKEMSPSPPAAQDPGGTALVSAREQSSERQHHPLGPTDMGRGEPVRRSAIRRGHRPRGSLDWPSEERGPVLAHLPSSDVMASNHETPEATGAGRLGSRRKPAAPPPSPAAREEQSRSSASSQKGPQALTRSNSLSTPRPTRASRLRRARLGDASDTEAADGERGSLGNPEPVGRPAAEQAKKLSRLDILAMPRKRAGSFTGTSDPEAAPARTSFSGRSVELCCASRKPTMAEARAVSRKAANTATTTGPRQPFSRARSGSARYTSTTQTPRAGSSSRARSRAPGPRDTDDDEEEPDPYGFIVQTAEIAEIARLSQTLVKDVAILAQEIHDVAGDGDTLGSSEPAHSASLSNMPSTPASTISAREELVQRIPEASLNFQKVPPGSLNSRDFDQNMNDSCEDALANKTRPRNREEVIFDNLMLNPVSQLSQAIRENTEHLAEKMKILFQNTGRAWEDLEARINAENEVPILKTSNKEISSILKELRRVQKQLEVINAIVDPSGSLDLLTGNRSLASSAQPGLGKGRVAAQSPPSPASAEALLPALPLRNFPQRASCGPPSLPDPTFLPDAERFLI

SEQ ID NO: 227 - protein, 595 aa, Homo sapiens
MWKSSFQYIASCWNHDGDPVELLKLGNQLAKFRQCLQENPKFLQEKVKQYFKNNQHKLTLSMRPDDKYHEKQAQVEATKLKQKVEALSPGDRQQIYEKGLELRSQQSKPQDASCLPALKVSDIEPTIPVTELDVVLTAGDIPVQYCAQPTNGMVYFRAFSSLNTLPEELRPYVPLFCSVLTKLGCGLLDYREQAQQIELKTGGMSASPHVLPDDSHMDTYEQGVLFSSLCLDRNLPDMMQLWSEIFNNPCFEEEEHFKVLVKMTAQELANGIPDSGHLYASIRAGRTLTPAGDLQETFSGMDQVRLMKRIAEMTDIKPILRKLPRIKKHLLNGDNMRCSVNATPQQMPQTEKAVEDFLRSIGRSKKERRPVRPHTVEKPVPSSSGGDAHVPHGSQVIRKLVMEPTFKPWQMKTHFLMPFPVNYVGECIRTVPYTDPDHASLKILARLMTAKFLHTEIREKGGAYGGGAKLSHNGIFTLYSYRDPNTIETLQSFGKAVDWAKSGKFTQQDIDEAKLSVFSTVDAPVAPSDKGMDHFLYGLSDEMKQAHREQLFAVSHDKLLAVSDRYLGTGKSTHGLAILGPENPKIAKDPSWIIR

SEQ ID NO: 228 - protein, 1575 aa, Homo sapiens
MPHEELPSLQRPRYGSIVDDERLSAEEMDERRRQNIAYEYLCHLEEAKRWMEVCLVEELPPTTELEEGLRNGVYLAKLAKFFAPKMVSEKKIYDVEQTRYKKSGLHFRHTDNTVQWLRAMESIGLPKIFYPETTDVYDRKNIPRMIYCIHALSLYLFKLGIAPQIQDLLGKVDFTEEEISNMRKELEKYGIQMPSFSKIGGILANELSVDEAALHAAVIAINEAVEKGIAEQTVVTLRNPNAVLTLVDDNLAPEYQKELWDAKKKKEENARLKNSCISEEERDAYEELLTQAEIQGNINKVNRQAAVDHINAVIPEGDPENTLLALKKPEAQLPAVYPFAAAMYQNELFNLQKQNTMNYLAHEELLIAVEMLSAVALLNQALESNDLVSVQNQLRSPAIGLNNLDKAYVERYANTLLSVKLEVLSQGQDNLSWNEIQNCIDMVNAQIQEENDRVVAVGYINEAIDEGNPLRTLETLLLPTANISDVDPAHAQHYQDVLYHAKSQKLGDSESVSKVLWLDEIQQAVDEANVDEDRAKQWVTLVVDVNQCLEGKKSSDILSVLKSSTSNANDIIPECADKYYDALVKAKELKSERVSSDGSWLKLNLHKKYDYYYNTDSKESSWVTPESCFYKESWLTGKEIEDIIEEVTVGYIRENIWSASEELLLRFQATSSGPILREEFEARKSFLHEQEENVVKIQAFWKGYKQRKEYMHRRQTFIDNTDSVVKIQSWFRMATARKSYLSRLQYFRDHNNEIVKIQSLLRANKARDDYKTLVGSENPPLTVIRKFVYLLDQSDLDFQEELEVARLREEVVTKIRANQQLEKDLNLMDIKIGLLVKNRITLEDVISHSKKLNKKKGGEMEILNNTDNQGIKSLSKERRKTLETYQQLFYLLQTNPLYLAKLIFQMPQNKSTKFMDTVIFTLYNYASNQREEYLLLKLFKTALEEEIKSKVDQVQDIVTGNPTVIKMVVSFNRGARGQNTLRQLLAPVVKEIIDDKSLIINTNPVEVYKAWVNQLETQTGEASKLPYDVTTEQALTYPEVKNKLEASIENLRRVTDKVLNSIISSLDLLPYGLRYIAKVLKNSIHEKFPDATEDELLKIVGNLLYYRYMNPAIVAPDGFDIIDMTAGGQINSDQRRNLGSVAKVLQHAASNKLFEGENEHLSSMNNYLSETYQEFRKYFKEACNVPEPEEKFNMDKYTDLVTVSKPVIYISIEEIISTHSLLLEHQDAIAPEKNDLLSELLGSLGEVPTVESFLGEGAVDPNDPNKANTLSQLSKTEISLVLTSKYDIEDGEAIDSRSLMIKTKKLIIDVIRNQPGNTLTEILETPATAQQEVDHATDMVSRAMIDSRTPEEMKHSQSMIEDAQLPLEQKKRKIQRNLRTLEQTGHVSSENKYQDILNEIAKDIRNQRIYRKLRKAELAKLQQTLNALNKKAAFYEEQINYYDTYIKTCLDNLKRKNTRRSIKLDGKGEPKGAKRAKPVKYTAAKLHEKGVLLDIDDLQTNQFKNVTFDIIATEDVGIFDVRSKFLGVEMEKVQLNIQDLLQMQYEGVAVMKMFDKVKVNVNLLIYLLNKKFYGK

SEQ ID NO: 229 - protein, 1048 aa, Homo sapiens
MQSKVTGNMPTQSLLMYMDGPEVIGSSLGSPMEMEDALSMKGTAVVPFRATQEKNVIQIEGYMPLDCMFCSQTFTHSEDLNKHVLMQHRPTLCEPAVLRVEAEYLSPLDKSQVRTEPPKEKNCKENEFSCEVCGQTFRVAFDVEIHMRTHKDSFTYGCNMCGRRFKEPWFLKNHMRTHNGKSGARSKLQQGLESSPATINEVVQVHAAESISSPYKICMVCGFLFPNKESLIEHRKVHTKKTAFGTSSAQTDSPQGGMPSSREDFLQLFNLRPKSHPETGKKPVRCIPQLDPFTTFQAWQLATKGKVAICQEVKESGQEGSTDNDDSSSEKELGETNKGSCAGLSQEKEKCKHSHGEAPSVDADPKLPSSKEKPTHCSECGKAFRTYHQLVLHSRVHKKDRRAGAESPTMSVDGRQPGTCSPDLAAPLDENGAVDRGEGGSEDGSEDGLPEGIHLDKNDDGGKIKHLTSSRECSYCGKFFRSNYYLNIHLRTHTGEKPYKCEFCEYAAAQKTSLRYHLERHHKEKQTDVAAEVKNDGKNQDTEDALLTADSAQTKNLKRFFDGAKDVTGSPPAKQLKEMPSVFQNVLGSAVLSPAHKDTQDFHKNAADDSADKVNKNPTPAYLDLLKKRSAVETQANNLICRTKADVTPPPDGSTTHNLEVSPKEKQTETAADCRYRPSVDCHEKPLNLSVGALHNCPAISLSKSLIPSITCPFCTFKTFYPEVLMMHQRLEHKYNPDVHKNCRNKSLLRSRRTGCPPALLGKDVPPLSSFCKPKPKSAFPAQSKSLPSAKGKQSPPGPGKAPLTSGIDSSTLAPSNLKSHRPQQNVGVQGAATRQQQSEMFPKTSVSPAPDKTKRPETKLKPLPVAPSQPTLGSSNINGSIDYPAKNDSPWAPPGRDYFCNRSASNTAAEFGEPLPKRLKSSVVALDVDQPGANYRRGYDLPKYHMVRGITSLLPQDCVYPSQALPPKPRFLSSSEVDSPNVLTVQKPYGGSGPLYTCVPAGSPASSSTLEGKRPVSYQHLSNSMAQKRNYENFIGNAHYRPNDKKT

SEQ ID NO: 230 - protein, 501 aa, Homo sapiens
MVRKPVVSTISKGGYLQGNVNGRLPSLGNKEPPGQEKVQLKRKVTLLRGVSIIIGTIIGAGIFISPKGVLQNTGSVGMSLTIWTVCGVLSLFGALSYAELGTTIKKSGGHYTYILEVFGPLPAFVRVWVELLIIRPAATAVISLAFGRYILEPFFIQCEIPELAIKLITAVGITVVMVLNSMSVSWSARIQIFLTFCKLTAILIIIVPGVMQLIKGQTQNFKDAFSGRDSSITRLPLAFYYGMYAYAGWFYLNFVTEEVENPEKTIPLAICISMAIVTIGYVLTNVAYFTTINAEELLLSNAVAVTFSERLLGNFSLAVPIFVALSCFGSMNGGVFAVSRLFYVASREGHLPEILSMIHVRKHTPLPAVIVLHPLTMIMLFSGDLDSLLNFLSFARWLFIGLAVAGLIYLRYKCPDMHRPFKVPLFIPALFSFTCLFMVALSLYSDPFSTGIGFVITLTGVPAYYLFIIWDKKPRWFRIMSEKITRTLQIILEVVPEEDKL

SEQ ID NO: 231 - protein, 229 aa, Homo sapiens
MSQGDSNPAAIPHAAEDIQGDDRWMSQHNRFVLDCKDKEPDVLFVGDSMVQLMQQYEIWRELFSPLHALNFGIGGDTTRHVLWRLKNGELENIKPKVIVVWVGTNNHENTAEEVAGGIEAIVQLINTRQPQAKIIVLGLLPRGEKPNPLRQKNAKVNQLLKVSLPKLANVQLLDTDGGFVHSDGAISCHDMFDFLHLTGGGYAKICKPLHELIMQLLEETPEEKQTTIA

SEQ ID NO: 232 - protein, 229 aa, Homo sapiens; identical to SEQ ID NO: 231

SEQ ID NO: 233 - protein, 140 aa, Homo sapiens
MAGWQSYVDNLMCDGCCQEAAIVGYCDAKYVWAATAGGVFQSITPIEIDMIVGKDREGFFTNGLTLGAKKCSVIRDSLYVDGDCTMDIRTKSQGGEPTYNVAVGRAGRALVIVMGKEGVHGGTLNKKAYELALYLRRSDV

SEQ ID NO: 234 - protein, 766 aa, Homo sapiens [sequence omitted]

SEQ ID NO: 235 - protein, 629 aa, Homo sapiens
MVLCPVIGKLLHKRVVLASASPRRQEILSNAGLRFEVVPSKFKEKLDKASFATPYGYAMETAKQKALEVANRLYQKDLRAPDVVIGADTIVTVGGLILEKPVDKQDAYRMLSRLSGREHSVFTGVAIVHCSSKDHQLDTRVSEFYEETKVKFSELSEELLWEYVHSGEPMDKAGGYGIQALGGMLVESVHGDFLNVVGFPLNHFCKQLVKLYYPPRPEDLRRSVKHDSIPAADTFEDLSDVEGGGSEPTQRDAGSRDEKAEAGEAGQATAEAECHRTRETLPPFPTRLLELIEGFMLSKGLLTACKLKVFDLLKDEAPQKAADIASKVDASACGMERLLDICAAMGLLEKTEQGYSNTETANVYLASDGEYSLHGFIMHNNDLTWNLFTYLEFAIREGTNQHHRALGKKAEDLFQDAYYQSPETRLRFMRAMHGMTKLTACQVATAFNLSRFSSACDVGGCTGALARELAREYPRMQVTVFDLPDIIELAAHFQPPGPQAVQIHFAAGDFFRDPLPSAELYVLCRILHDWPDDKVHKLLSKVAESCKPGAGLLLVETLLDEEKRVAQRALMQSLNMLVQTEGKERSLGEYQCLLELHGFHQVQVVHLGGVLDAILPPKWPPEAQAACSL

SEQ ID NO: 236 - protein, 189 aa, Homo sapiens
MTEYKLVVVGAGGVGKSALTIQLIQNHFVDEYDPTIEDSYRKQVVIDGETCLLDILDTAGQEEYSAMRDQYMRTGEGFLCVFAINNTKSFEDIHQYREQIKRVKDSDDVPMVLVGNKCDLAARTVESRQAQDLARSYGIPYIETSAKTRQGVEDAFYTLVREIRQHKLRKLNPPDESGPGCMSCKCVLS

SEQ ID NO: 237 - protein, 922 aa, Homo sapiens
MAEQRFCVDYAKRGTAGCKKCKEKIVKGVCRIGKVVPNPFSESGGDMKEWYHIKCMFEKLERARATTKKIEDLTELEGWEELEDNEKEQITQHIADLSSKAAGTPKKKAVVQAKLTTTGQVTSPVKGASFVTSTNPRKFSGFSAKPNNSGEAPSSPTPKRSLSSSKCDPRHKDCLLREFRKLCAMVADNPSYNTKTQIIQDFLRKGSAGDGFHGDVYLTVKLLLPGVIKTVYNLNDKQIVKLFSRIFNCNPDDMARDLEQGDVSETIRVFFEQSKSFPPAAKSLLTIQEVDEFLLRLSKLTKEDEQQQALQDIASRCTANDLKCIIRLIKHDLKMNSGAKHVLDALDPNAYEAFKASRNLQDVVERVLHNAQEVEKEPGQRRALSVQASLMTPVQPMLAEACKSVEYAMKKCPNGMFSEIKYDGERVQVHKNGDHFSYFSRSLKPVLPHKVAHFKDYIPQAFPGGHSMILDSEVLLIDNKTGKPLPFGTLGVHKKAAFQDANVCLFVFDCIYFNDVSLMDRPLCERRKFLHDNMVEIPNRIMFSEMKRVTKALDLADMITRVIQEGLEGLVLKDVKGTYEPGKRHWLKVKKDYLNEGAMADTADLVVLGAFYGQGSKGGMMSIFLMGCYDPGSQKWCTVTKCAGGHDDATLARLQNELDMVKISKDPSKIPSWLKVNKIYYPDFIVPDPKKAAVWEITGAEFSKSEAHTADGISIRFPRCTRIRDDKDWKSATNLPQLKELYQLSKEKADFTVVAGDEGSSTTGGSSEENKGPSGSAVSRKAPSKPSASTKKAEGKLSNSNSKDGNMQTAKPSAMKVGEKLATKSSPVKVGEKRKAADETLCQTKVLLDIFTGVRLYLPPSTPDFSRLRRYFVAFDGDLVQEFDMTSATHVLGSRDKNPAAQQVSPEWIWACIRKRRLVAPC

SEQ ID NO: 238 - protein, 997 aa, Homo sapiens
MENAHTKTVEEVLGHFGVNESTGLSLEQVKKLKERWGSNELPAEEGKTLLELVIEQFEDLLVRILLLAACISFVLAWFEEGEETITAFVEPFVILLILVANAIVGVWQERNAENAIEALKEYEPEMGKVYRQDRKSVQRIKAKDIVPGDIVEIAVGDKVPADIRLTSIKSTTLRVDQSILTGESVSVIKHTDPVPDPRAVNQDKKNMLFSGTNIAAGKAMGVVVATGVNTEIGKIRDEMVATEQERTPLQQKLDEFGEQLSKVISLICIAVWIINIGHFNDPVHGGSWIRGAIYYFKIAVALAVAAIPEGLPAVITTCLALGTRRMAKKNAIVRSLPSVETLGCTSVICSDKTGTLTTNQMSVCRMFILDRVEGDTCSLNEFTITGSTYAPIGEVHKDDKPVNCHQYDGLVELATICALCNDSALDYNEAKGVYEKVGEATETALTCLVEKMNVFDTELKGLSKIERANACNSVIKQLMKKEFTLEFSRDRKSMSVYCTPNKPSRTSMSKMFVKGAPEGVIDRCTHIRVGSTKVPMTSGVKQKIMSVIREWGSGSDTLRCLALATHDNPLRREEMHLEDSANFIKYETNLTFVGCVGMLDPPRIEVASSVKLCRQAGIRVIMITGDNKGTAVAICRRIGIFGQDEDVTSKAFTGREFDELNPSAQRDACLNARCFARVEPSHKSKIVEFLQSFDEITAMTGDGVNDAPALKKAEIGIAMGSGTAVAKTASEMVLADDNFSTIVAAVEEGRAIYNNMKQFIRYLISSNVGEVVCIFLTAALGFPEALIPVQLLWVNLVTDGLPATALGFNPPDLDIMNKPPRNPKEPLISGWLFFRYLAIGCYVGAATVGAAAWWFIAADGGPRVSFYQLSHFLQCKEDNPDFEGVDCAIFESPYPMTMALSVLVTIEMCNALNSLSENQSLLRMPPWENIWLVGSICLSMSLHFLILYVEPLPLIFQITPLNVTQWLMVLKISLPVILMDETLKFVARNYLEPAILE

SEQ ID NO: 239 - protein, 410 aa, Homo sapiens
MVRPRRAPYRSGAGGPLGGRGRPPRPLVVRAVRSRSWPASPRGPQPPRIRARSAPPMEGARVFGALGPIGPSSPGLTLGGLAVSEHRLSNKLLAWSGKRRPYSDSTAKLKRTLPCQAYVNQGENLETDQWPQKLIMQLIPQQLLTTLGPLFRNSQLAQFHFTNRDCDSLKGLCRIMGNGFAGCMLFPHISPCEVRVLMLLYSSKKKIFMGLIPYDQSGFVSAIRQVITTRKQAVGPGGVNSGPVQIVNNKFLAWSGVMEWQEPRPEPNSRSKRWLPSHVYVNQGEILRTEQWPRKLYMQLIPQQLLTTLVPLFRNSRLVQFHFTKDLETLKSLCRIMDNGFAGCVHFSYKASCEIRVLMLLYSSEKKIFIGLIPHDQGNFVNGIRRVIANQQQVLQRNLEQEQQQRGMGG

SEQ ID NO: 240 - protein, 577 aa, Homo sapiens
MTELAGASSSCCHRPAGRGAMQSVLHHFQRLRGREGGSHFINTSSPRGEAKMSITSDEVNFLVYRYLQESGFSHSAFTFGIESHISQSNINGTLVPPAALISILQKGLQYVEAEISINEDGTVFDGRPIESLSLIDAVMPDVVQTRQQAFREKLAQQQASAAAAAAAATAAATAATTTSAGVSHQNPSKNREATVNGEENRAHSVNNHAKPMEIDGEVEIPSSKATVLRGHESEVFICAWNPVSDLLASGSGDSTARIWNLNENSNGGSTQLVLRHCIREGGHDVPSNKDVTSLDWNTNGTLLATGSYDGFARIWTEDGNLASTLGQHKGPIFALKWNRKGNYILSAGVDKTTIIWDAHTGEAKQQFPFHSAPALDVDWQNNTTFASCSTDMCIHVCRLGCDRPVKTFQGHTNEVNAIKWDPSGMLLASCSDDMTLKIWSMKQEVCIHDLQAHNKEIYTIKWSPTGPATSNPNSNIMLASASFDSTVRLWDIERGVCTHTLTKHQEPVYSVAFSPDGKYLASGSFDKCVHIWNTQSGNLVHSYRGTGGIFEVCWNARGDKVGASASDGSVCVLDLRK

SEQ ID NO: 241 - protein, 62 aa, Homo sapiens
QSSTVDSQDEQNGDVRRTDEVAIHQEGRAADLGTTKELTQLATKYLENTKVTQTPESMLLAA

SEQ ID NO: 242 - protein, 371 aa, Homo sapiens
MDRGAKSCPANFLAAADDKLSGFQGDFLWPILVVEFLVAVASNGLALYRFSIRKQRPWHPAVVFSVQLAVSDLLCALTLPPLAAYLYPPKHWRYGEAACRLERFLFTCNLLGSVIFITCISLNRYLGIVHPFFARSHLRPKHAWAVSAAGWVLAALLAMPTLSFSHLKRPQQGAGNCSVARPEACIKCLGTADHGLAAYRAYSLVLAGLGCGLPLLLTLAAYGALGRAVLRSPGMTVAEKLRVAALVASGVALYASSYVPYHIMRVLNVDARRRWSTRCPSFADIAQATAALELGPYVGYQVMRGLMPLAFCVHPLLYMAAVPSLGCCCRHCPGYRDSWNPEDAKSTGQALPLNATAAPKPSEPQSRELSQ

SEQ ID NO: 243 - protein, 1151 aa, Homo sapiens
MLRRVTVAAVCATRRKLCEAGRDVAALWGIETRGRCEDSAAARPFPILAMPGRNKAKSTCSCPDLQPNGQDLGENSRVARLGADESEEEGRRGSLSNAGDPEIVKSPSDPKQYRYIKLQNGLQALLISDLSNMEGKTGNTTDDEEEEEVEEEEEDDDEDSGAEIEDDDEEGFDDEDEFDDEHDDDLDTEDNELEELEERAEARKKTTEKQSAAALCVGVGSFADPDDLPGLAHFLEHMVFMGSLKYPDENGFDAFLKKHGGSDNASTDCERTVFQFDVQRKYFKEALDRWAQFFIHPLMIRDAIDREVEAVDSEYQLARPSDANRKEMLFGSLARPGHPMGKFFWGNAETLKHEPRKNNIDTHARLREFWMRYYSSHYMTLVVQSKETLDTLEKWVTEIFSQIPNNGLPRPNFGHLTDPFDTPAFNKLYRVVPIRKIHALTITWALPPQQQHYRVKPLHYISWLVGHEGKGSILSFLRKKCWALALFGGNGETGFEQNSTYSVFSISITLTDEGYEHFYEVAYTVFLYLKMLQKLGPEKRIFEEIRKIEDNEFHYQEQTDPVEYVENMCENMQLYPLQDILTGDQLLFEYKPEVIGEALNQLVPQKANLVLLSGANEGKCDLKEKWFGTQYSIEDIENSWAELWNSNFELNPDLHLPAENKYIATDFTLKAFDCPETEYPVKIVNTPQGCLWYKKDNKFKIPKAYIRFHLISPLIQKSAANVVLFDIFVNILTHNLAEPAYEADVAQLEYKLAAGEHGLIIRVKGFNHKLPLLFQLIIDYLAEFNSTPAVFTMITEQLKKTYFNILIKPETLAKDVRLLILEYARWSMIDKYQALMDGLSLESLLSFVKEFKSQLFVEGLVQGNVTSTESMDFLKYVVDKLNFKPLEQEMPVQFQVVELPSGHHLCKVKALNKGDANSEVTVYYQSGTRSLREYTLMELLVMHMEEPCFDFLRTKQTLGYHVYPTCRNTSGILGFSVTVGTQATKYNSEVVDKKIEEFLSSFEEKIENLTEEAFNTQVTALIKLKECEDTHLGEEVDRNWNEVVTQQYLFDRLAHEIEALKSFSKSDLVNWFKAHRGPGSKMLSVHVVGYGKYELEEDGSPSSEDSNSSCEVMQLTYLPTSPLLADCIIPITDIRAFTTTLNLLPYHKIVK

SEQ ID NO: 244 - protein, 80 aa, Homo sapiens
MALPKPSDGTLPAEVQGRGQRRRLVWTPSQSKALQACFERNPYPGITTRERLAQAIGIPEPRVQILFQNERSCQLRQHWH

SEQ ID NO: 245 - protein, 291 aa, Homo sapiens
MERKRWECPALPQGWEREEVPRRSGLSAGHRDVFYYSPSGKKFRSKPQLARYLGGSMDLSTFDFRTGKMLMSKMNKSRQRVRYDSSNQVKGKPDLNTALPVRQTASIFKQPVTKITNHPSNKVKSDPQKAVDQPRQLFWEKKLSGLNAFDIAEELVKTMDLPKGLQGVGPGCTDETLLSAIASALHTSTMPITGQLSAAVEKNPGVWLNTTQPLCKAFMVTDEDIRKQEELVQQVRKRLEEALMADMLAHVEELARDGEAPLDKACAEDDDEEDEEEEEEEPDPDPEMEHV

SEQ ID NO: 246 - protein, 382 aa, Homo sapiens
MRSPLCWLLPLLILASVAQGQPTRRPRPGTGPGRRPRPRPRPTPSFPQPDEPAEPTDLPPPLPPGPPSIFPDCPRECYCPPDFPSALYCDSRNLRKVPVIPPRIHYLYLQNNFITELPVESFQNATGLRWINLDNNRIRKIDQRVLEKLPGLVFLYMEKNQLEEVPSALPRNLEQLRLSQNHISRIPPGVFSKLENLLLLDLQHNRLSDGVFKPDTFHGLKNLMQLNLAHNILRKMPPRVPTAIHQLYLDSNKIETIPNGYFKSFPNLAFIRLNYNKLTDRGLPKNSFNISNLLVLHLSHNRISSVPAINNRLEHLYLNNNSIEKINGTQICPNDLVAFHDFSSDLENVPHLRYLRLDGNYLKPPIPLDLMMCFRLLQSVVI

SEQ ID NO: 247 - protein, 191 aa, Homo sapiens
KKLKVSELKEELKKRRLSDKGLKAELMERLQAALDDEEAGGRPAMEPGNGSLDLGGDSAGRSGAGLEQEAAAGGDEEEEEEEEEEEGISALDGDQMELGEENGAAGAADSGPMEEEEAASEDENGDDQGFQEGEDELGDEEEGAGDENGHGEQQPQPPATQQQQPQQQRGAAKEAAGKSSGPTSLFAVTVA

SEQ ID NO: 248 - protein, 253 aa, Homo sapiens
MGQCGITSSKTVLVFLNLIFWGAAGILCYVGAYVFITYDDYDHFFEDVYTLIPAVVIIAVGALLFIIGLIGCCATIRESRCGLATFVIILLLVFVTEVVVVVLGYVYRAKVENEVDRSIQKVYKTYNGTNPDAASRAIDYVQRQLHCCGIHNYSDWENTDWFKETKNQSVPLSCCRETASNCNGSLAHPSDLYAEGCEALVVKKLQEIMMHVIWAALAFAAIQLLGMLCACIVLCRRSRDPAYELLITGGTYA

SEQ ID NO: 249 - protein, 368 aa, Homo sapiens
MWPLWRLVSLLALSQALPFEQRGFWDFTLDDGPFMMNDEEASGADTSGVLDPDSVTPTYSAMCPFGCHCHLRVVQCSDLGLKSVPKEISPDTTLLDLQNNDISELRKDDFKGLQHLYALVLVNNKISKIHEKAFSPLRKLQKLYISKNHLVEIPPNLPSSLVELRIHDNRIRKVPKGVFSGLRNMNCIEMGGNPLENSGFEPGAFDGLKLNYLRISEAKLTGIPKDLPETLNELHLDHNKIQAIELEDLLRYSKLYRLGLGHNQIRMIENGSLSFLPTLRELHLDNNKLARVPSGLPDLKLLQVVYLHSNNITKVGVNDFCPMGFGVKRAYYNGISLFNNPVPYWEVQPATFRCVTDRLAIQFGNYKK

SEQ ID NO: 250 - protein, 173 aa, Homo sapiens
VYDYLRPIALNLCADKVSSVRWISYKLVSEMVKKLHAATPPTFGVDLINELVENFGRCPKWSGRQAFVFVCQTVIEDDCLPMDQFAVHLMPHLLTLANDRVPNVRVLLAKTLRQTLLEKDYFLASASCHQEAVEQTIMALQMDRDSDVKYFASIHPASTKISEDAMSTASSTY

SEQ ID NO: 251 - protein, 99 aa, Homo sapiens
MRPLDIDEVEAPEEVEVLEPEEDFEQFLLPVINEMREDIASLIREHGRAYLRTRSKLWEMDNMLIQIKTQVEASEESALNHVQHPSGERRESVGVVREG

SEQ ID NO: 252 - protein, 403 aa, Homo sapiens
MAMVTGGWGGPGGDTNGVDKAGGYPRAAEDDSASPPGAASDAEPGDEERPGLQVDCVVCGDKSSGKHYGVFTCEGCKSFFKRTIRRNLSYTCRSNRDCQIDQHHRNQCQYCRLKKCFRVGMRKEAVQRGRIPHSLPGAVAASSGSPPGSALAAVASGGDLFPGQPVSELIAQLLRAEPYPAAAGRFGAGGGAAGAVLGIDNVCELAARLLFSTVEWARHGFFPELPVADQVALLRMSWSELFVLNAAQAALPLHTAPLLAAAGLHAAPMAAERAVAFMDQVRAFQEQVDKLGRLQVDSAEYGCLKAIALFTPDACGLSDPAHVESLQEKAQVALTEYVRAQYPSQPQRFGRLLLRLPALRAVPASLISQLFFMRLVGKTPIETLIRDMLLSGSTFNWPYGSGQ

SEQ ID NO: 253 - protein, 410 aa, Homo sapiens
MEAENAGSYSLQQAQAFYTFPFQQLMAEAPNMAVVNEQQMPEEVPAPAPAQEPVQEAPKGRKRKPRTTEPKQPVEPKKPVESKKSGKSAKPKEKQEKITDTFKVKRKVDRFNGVSEAELLTKTLPDILTFNLDIVIIGINPGLMAAYKGHHYPGPGNHFWKCLFMSGLSEVQLNHMDDHTLPGKYGIGFTNMVERTTPGSKDLSSKEFREGGRILVQKLQKYQPRIAVFNGKCIYEIFSKEVFGVKVKNLEFGLQPHKIPDTETLCYVMPSSSARCAQFPRAQDKVHYYIKLKDLRDQLKGIERNMDVQEVQYTFDLQLAQEDAKKMAVKEEKYDPGYEAAYGGAYGENPCSSEPCGFSSNGLIESVELRGESAFSGIPNGQWMTQSFTDQIPSFSNHCGTQEQEEESHA

SEQ ID NO: 254 - protein, 737 aa, Homo sapiens
MNGDSRAAVVTSPPPTTAPHKERYFDRVDENNPEYLRERNMAPDLRQDFNMMEQKKRVSMILQSPAFCEELESMIQEQFKKGKNPTGLLALQQIADFMTTNVPNVYPAAPQGGMAALNMSLGMVTPVNDLRGSDSIAYDKGEKLLRCKLAAFYRLADLFGWSQLIYNHITTRVNSEQEHFLIVPFGLLYSEVTASSLVKINLQGDIVDRGSTNLGVNQAGFTLHSAIYAARPDVKCVVHIHTPAGAAVSAMKCGLLPISPEALSLGEVAYHDYHGILVDEEEKVLIQKNLGPKSKVLILRNHGLVSVGESVEEAFYYIHNLVVACEIQVRTLASAGGPDNLVLLNPEKYKAKSRSPGSPVGEGTGSPPKWQIGEQEFEALMRMLDNLGYRTGYPYRYPALREKSKKYSDVEVPASVTGYSFASDGDSGTCSPLRHSFQKQQREKTRWLNSGRGDEASEEGQNGSSPKSKTKWTKEDGHRTSTSAVPNLFVPLNTNPKEVQEMRNKIREQNLQDIKTAGPQSQVLCGVVMDRSLVQGELVTASKAIIEKEYQPHVIVSTTGPNPFTTLTDRELEEYRREVERKQKGSEENLDEAREQKEKSPPDQPAVPHPPPSTPIKLEEDLVPEPTTGDDSDAATFKPTLPDLSPDEPSEALGFPMLEKEEEAHRPPSPTEAPTEASPEPAPDPAPVAEEAAPSAVEEGAAADPGSDGSPGKSPSKKKKKFRTPSFLKKSKKKSDS

SEQ ID NO: 255 - protein, 579 aa, Homo sapiens
MNKLYIGNLSENAAPSDLESIFKDAKIPVSGPFLVKTGYAFVDCPDESWALKAIEALSGKIELHGKPIEVEHSVPKRQRIRKLQIRNIPPHLQWEVLDSLLVQYGVVESCEQVNTDSETAVVNVTYSSKDQARQALDKLNGFQLENFTLKVAYIPDEMAAQQNPLQQPRGRRGLGQRGSSRQGSPGSVSKQKPCDLPLRLLVPTQFVGAIIGKEGATIRNITKQTQSKIDVHRKENAGAAEKSITILSTPEGTSAACKSILEIMHKEAQDIKFTEEIPLKILAHNNFVGRLIGKEGRNLKKIEQDTDTKITISPLQELTLYNPERTITVKGNVETCAKAEEEIMKKIRESYENDIASMNLQAHLIPGLNLNALGLFPPTSGMPPPTSGPPSAMTPPYPQFEQSETETVHQFIPALSVGAIIGKQGQHIKQLSRFAGASIKIAPAEAPDAKVRMVIITGPPEAQFKAQGRIYGKIKEENFVSPKEEVKLEAHIRVPSFAAGRVIGKGGKTVNELQNLSSAEVVVPRDQTPDENDQVVVKITGHFYACQVAQRKIQEILTQVKQHQQQKALQSGPPQSRRK

SEQ ID NO: 256 - protein, 355 aa, Homo sapiens
MGQPPAEEAEQPGALAREFLAAMEPEPAPAPAPEEWLDILGNGLLRKKTLVPGPPGSSRPVKGQVVTVHLQTSLENGTRVQEEPELVFTLGDCDVIQALDLSVPLMDVGETAMVTADSKYCYGPQGRSPYIPPHAALCLEVTLKTAVDGPDLEMLTGQERVALANRKRECGNAHYQRADFVLAANSYDLAIKAITSSAKVDMTFEEEAQLLQLKVKCLNNLAASQLKLDHYRAALRSCSLVLEHQPDNIKALFRKGKVLAQQGEYSEAIPILRAALKLEPSNKTIHAELSKLVKKHAAQRSTETALYRKMLGNPSRLPAKCPGKGAWSIPWKWLFGATAVALGGVALSVVIAARN

SEQ ID NO: 257 - protein, 567 aa, Homo sapiens [sequence omitted]

SEQ ID NO: 258 - protein, 359 aa, Homo sapiens
MSDEGSRGSRLPLALPPASQGCSSGGGGGGSSAGGSGNSRPPRNLQGLLQMAITAGSEEPDPPPEPMSEERRQWLQEAMSAAFRGQREEVEQMKSCLRVLSQPMPPTAGEAEQAADQQEREGALELLADLCENMDNAADFCQLSGMHLLVGRYLEAGAAGLRWRAAQLIGTCSQNVAAIQEQVLGLGALRKLLRLLDRDACDTVRVKALFAISCLVREQEAGLLQFLRLDGFSVLMRAMQQQVQKLKVKSAFLLQNLLVGHPEHKGTLCSMGMVQQLVALVRTEHSPFHEHVLGALCSLVTDFPQGVRECREPELGLEELLRHRCQLLQQHEEYQEELEFCEKLLQTCFSSPADDSMDR

SEQ ID NO: 259 - protein, 297 aa, Homo sapiens
MSQERPTFYRQELNKTIWEVPERYQNLSPVGSGAYGSVCAAFDTKTGLRVAVKKLSRPFQSIIHAKRTYRELRLLKHMKHENVIGLLDVFTPARSLEEFNDVYLVTHLMGADLNNIVKCQKLTDDHVQFLIYQILRGLKYIHSADIIHRDLKPSNLAVNEDCELKILDFGLARHTDDEMTGYVATRWYRAPEIMLNWMHYNQTVDIWSVGCIMAELLTGRTLFPGTDHIDQLKLILRLVGTPGAELLKKISSESARNYIQSLTQMPKMNFANVFIGANPLGKLTIYPHLMDIELVMI

SEQ ID NO: 260 - protein, 1220 aa, Homo sapiens
MGDMANNSVAYSGVKNSLKEANHDGDFGITLAELRALMELRSTDALRKIQESYGDVYGICTKLKTSPNEGLSGNPADLERREAVFGKNFIPPKKPKTFLQLVWEALQDVTLIILEIAAIVSLGLSFYQPPEGDNALCGEVSVGEEEGEGETGWIEGAAILLSVVCVVLVTAFNDWSKEKQFRGLQSRIEQEQKFTVIRGGQVIQIPVADITVGDIAQVKYGDLLPADGILIQGNDLKIDESSLTGESDHVKKSLDKDPLLLSGTHVREGSGRMVVTAVGVNSQTGIIFTLLGAGGEEEEKKDEKKKEKKNKKQDGAIENRNKAKAQDGAAMEMQPLKSEEGGDGDEKDKKKANLPKKEKSVLQGKLTKLAVQIGKAGLLMSAITVIILVLYFVIDTFWVQKRPWLAECTPIYIQYFVKFFIIGVTVLVVAVPEGLPLAVTISLAYSVKKMMKDNNLVRHLDACETMGNATAICSDKTGTLTMNRMTVVQAYINEKHYKKVPEPEAIPPNILSYLVTGISVNCAYTSKILPPEKEGGLPRHVGNKTECALLGLLLDLKRDYQDVRNEIPEEALYKVYTFNSVRKSMSTVLKNSDGSYRIFSKGASEIILKKCFKILSANGEAKVFRPRDRDDIVKTVIEPMASEGLRTICLAFRDFPAGEPEPEWDNENDIVTGLTCIAVVGIEDPVRPEVPDAIKKCQRAGITVRMVTGDNINTARAIATKCGILHPGEDFLCLEGKDFNRRIRNEKGEIEQERIDKIWPKLRVLARSSPTDKHTLVKGIIDSTVSDQRQVVAVTGDGTNDGPALKKADVGFAMGIAGTDVAKEASDIILTDDNFTSIVKAVMWGRNVYDSISKFLQFQLTVNVVAVIVAFTGACITQDSPLKAVQMLWVNLIMDTLASLALATEPPTESLLLRKPYGRNKPLISRTMMKNILGHAFYQLVVVFTLLFAGEKFFDIDSGRNAPLHAPPSEHYTIVFNTFVLMQLFNEINARKIHGERNVFEGIFNNAIFCTIVLGTFVVQIIIVQFGGKPFSCSELSIEQWLWSIFLGMGTLLWGQLISTIPTSRLKFLKEAGHGTQKEEIPEEELAEDVEEIDHAERELRRGQILWFRGLNRIQTQIRVVNAFRSSLYEGLEKPESRSSIHNFMTHPEFRIEDSEPHIPLIDDTDAEDDAPTKRNSSPPPSPNKNNNAVDSGIHLTIEMNKSATSSSPGSPLHSLETSL

SEQ ID NO: 261 - protein, 535 aa, Homo sapiens
MEEGARHRNNTEKKHPGGGESDASPEAGSGGGGVALKKEIGLVSACGIIVGNIIGSGIFVSPKGVLENAGSVGLALIVWIVTGFITVVGALCYAELGVTIPKSGGDYSYVKDIFGGLAGFLRLWIAVLVIYPTNQAVIALTFSNYVLQPLFPTCFPPESGLRLLAAICLLLLTWVNCSSVRWATRVQDIFTAGKLLALALIIIMGIVQICKGEYFWLEPKNAFEDFQEPDIGLVALAFLQGSFAYGGWNFLNYVTEELVDPYKNLPRAIFISIPLVTFVYVFANVAYVTAMSPQELLASNAVAVTFGEKLLGVMAWIMPISVALSTFGGVNGSLFTSSRLFFAGAREGHLPSVLAMIHVKRCTPIPALLFTCISTLLMLVTSDMYTLINYVGFINYLFYGGTVAGQIVLRWKKPDIPRPIKINLLFPIIYLLFWAFLLVFSLWSEPVVCGIGLAIMLTGVPVYFLGVYWQHKPKCFSDFIELLTLVSQKMCVVVYPEVERGSGTEEANEDMEEQQQPMYQPTPTKDKDVAGQPQP

SEQ ID NO: 262 - protein, 512 aa, Homo sapiens
MDLKESPSEGSLQPSSIQIFANTSTLHGIRHIFVYGPLTIRRVLWAVAFVGSLGLLLVESSERVSYYFSYQHVTKVDEVVAQSLVFPAVTLCNLNGFRFSRLTTNDLYHAGELLALLDVNLQIPDPHLADPSVLEALRQKANFKHYKPKQFSMLEFLHRVGHDLKDMMLYCKFKGQECGHQDFTTVFTKYGKCYMFNSGEDGKPLLTTVKGGTGNGLEIMLDIQQDEYLPIWGETEETTFEAGVKVQIHSQSEPPFIQELGFGVAPGFQTFVATQEQRLTYLPPPWGECRSSEMGLDFFPVYSITACRIDCETRYIVENCNCRMVHMPGDAPFCTPEQHKECAEPALGLLAEKDSNYCLCRTPCNLTRYNKELSMVKIPSKTSAKYLEKKFNKSEKYISENILVLDIFFEALNYETIEQKKAYEVAALLGDIGGQMGLFIGASILTILELFDYIYELIKEKLLDLLGKEEDEGSHDENVSTCDTMPNHSETISHTVNVPLQTTLGTLEEIAC

SEQ ID NO: 263 - protein, 4097 aa, Homo sapiens [sequence omitted]

SEQ ID NO: 264 - protein, 338 aa, Homo sapiens
MTTTLVSATIFDLSEVLCKGNKMLNYSAPSAGGCLLDRKAVGTPAGGGFPRRHSVTLPSSKFHQNQLLSSLKGEPAPALSSRDSRFRDRSFSEGGERLLPTQKQPGGGQVNSSRYKTELCRPFEENGACKYGDKCQFAHGIHELRSLTRHPKYKTELCRTFHTIGFCPYGPRCHFIHNAEERRALAGARDLSADRPRLQHSFSFAGFPSAAATAAATGLLDSPTSITPPPILSADDLLGSPTLPDGTNNPFAFSSQELASLFAPSMGLPGGGSPTTFLFRPMSESPHMFDSPPSPQDSLSDQEGYLSSSSSSHSGSDSPTLDNSRRLPIFSRLSISDD

SEQ ID NO: 265 - protein, 573 aa, Homo sapiens
RFSGQSYVRYRAPAARNWHIHFYLKTLQPQAILLFTNETASVSLKLASGVPQLEYHCLGGFYGNLSSQRHVNDHEWHSILVEEMDASIRLMVDSMGNTSLVVPENCRGLRPERHLLLGGLILLHSSSNVSQGFEGCLDAVVVNEEALDLLAPGKTVAGLLETQALTQCCLHSDYCSQNTCLNGGKCSWTHGAGYVCKCPPQFSGKHCEQGRENCTFAPCLEGGTCILSPKGASCNCPHPYTGDRCEMEARGCSEGHCLVTPEIQRGDWGQQELLIITVAVAFIIISTVGLLFYCRRCKSHKPVAMEDPDLLARSVGVDTQAMPAIELNPLSASSCNNLNQLEPSKASVPNELVTFGPNSKQRPVVCSVPPRLPPAAVPSHSDNGPVIKRTWSSEEMVYPGGAMVWPPTYSRNERWEYPHSEVTQGPLPPSAHRHSTPVVMPEPNGLYGGFPFPLEMENKRAPLPPRYSNQNLEDLMPSRPPSPRERLVAPCLNEYTAISYYHSQFRQGGGGPCLADGGYKGVGMRLSRAGPSYAVCEVEGAPLAGQGQPRVPPNYEGSDMVESDYGSCEEVMF

SEQ ID NO: 266 - protein, 146 aa, Homo sapiens
MATAEASGSDGKGQEVETSVTYYRLEEVAKRNSLKELWLVIHGRVYDVTRFLNEHPGGEEVLLEQAGVDASESFEDVGHSSDAREMLKQYYIGDIHPSDLKPESGSKDPSQNDTCKSCWAYWILPIIGAVLLGFLYRYYTSESKSS

SEQ ID NO: 267 - protein, 240 aa, Homo sapiens
MNKQRGTFSEVSLAQDPKPQQRKPKGNKSSISGTEQEIFQVELNLQNASLNHQGIDKIYDCQGLLPPPEKLTAEVLGIICIVLMATVLKTIVLIPFLEQNNSSPNTRTQKARPCGHCPEEWITYSNSCYYIGKERRTWEESLQACASKNSSSLLSIDNEEEMKFLASILPSSWIGVFRNSSHHPWVTINGLAFKHEIKDSDHAERNCAMLHVRGLISDQCGSSRIIRRGFIMLTRLVLNS

SEQ ID NO: 268 - protein, 328 aa, Homo sapiens
MLPRVGCPALPLPPPPLLPLLPLLLLLLGASGGGGGARAEVLFRCPPCTPERLAACGPPPVAPPAAVAAVAGGARMPCAELVREPGCGCCSVCARLEGEACGVYTPRCGQGLRCYPHPGSELPLQALVMGEGTCEKRRDAEYGASPEQVADNGDDHSEGGLVENHVDSTMNMLGGGGSAGRKPLKSGMKELAVFREKVTEQHRQMGKGGKHHLGLEEPKKLRPPPARTPCQQELDQVLERISTMRLPDERGPLEHLYSLHIPNCDKHGLYNLKQCKMSLNGQRGECWCVNPNTGKLIQGAPTIRGDPECHLFYNEQQEARGVHTQRMQ

SEQ ID NO: 269 - protein, 281 aa, Homo sapiens [sequence omitted]

SEQ ID NO: 270 - protein, 124 aa, Homo sapiens
MAAAMTFCRLLNRCGEAARSLPLGARCFGVRVSPTGEKVTHTGQVYDDKDYRRIRFVGRQKEVNENFAIDLIAEQPVSEVETRVIACDGGGGALGHPKVYINLDKETKTGTCGYCGLQFRQHHH

SEQ ID NO: 271 - protein, 236 aa, Homo sapiens
MTSEKGPSTGDPTLRRRIEPWEFDVFYDPRELRKEACLLYEIKWGMSRKIWRSSGKNTTNHVEVNFIKKFTSERDFHPSISCSITWFLSWSPCWECSQAIREFLSRHPGVTLVIYVARLFWHMDQQNRQGLRDLVNSGVTIQIMRASEYYHCWRNFVNYPPGDEAHWPQYPPLWMMLYALELHCIILSLPPCLKISRRWQNHLTFFRLHLQNCHYQTIPPHILLATGLIHPSVAWR

SEQ ID NO: 272 - protein, 160 aa, Homo sapiens
MVPSAGQLALFALGIVLAACQALENSTSPLSADPPVAAAVVSHFNDCPDSHTQFCFHGTCRFLVQEDKPACVCHSGYVGARCEHADLLAVVAASQKKQAITALVVVSIVALAVLIITCVLIHCCQVRKHCEWCRALICRHEKPSALLKGRTACCHSETVV

SEQ ID NO: 273 - protein, 998 aa, Homo sapiens [sequence omitted]

SEQ ID NO: 274 - protein, 1400 aa, Homo sapiens
MELLPPLPQSFLLLLLLPAKPAAGEDWQCPRTPYAASRDFDVKYVVPSFSAGGLVQAMVTYEGDRNESAVFVAIRNRLHVLGPDLKSVQSLATGPAGDPGCQTCAACGPGPHGPPGDTDTKVLVLDPALPALVSCGSSLQGRCFLHDLEPQGTAVHLAAPACLFSAHHNRPDDCPDCVASPLGTRVTVVEQGQASYFYVASSLDAAVAGSFSPRSVSIRRLKADASGFAPGFVALSVLPKHLVSYSIEYVHSFHTGAFVYFLTVQPASVTDDPSALHTRLARLSATEPELGDYRELVLDCRFAPKRRRRGAPEGGQPYPVLQVAHSAPVGAQLATELSIAEGQEVLFGVFVTGKDGGPGVGPNSVVCAFPIDLLDTLIDEGVERCCESPVHPGLRRGLDFFQSPSFCPNPPGLEALSPNTSCRHFPLLVSSSFSRVDLFNGLLGPVQVTALYVTRLDNVTVAHMGTMDGRILQVELVRSLNYLLYVSNFSLGDSGQPVQRDVSRLGDHLLFASGDQVFQVPIRGPGCRHFLTCGRCLRAWHFMGCGWCGNMCGQQKECPGSWQQDHCPPKLTEFHPHSGPLRGSTRLTLCGSNFYLHPSGLVPEGTHQVTVGQSPCRPLPKDSSKLRPVPRKDFVEEFECELEPLGTQAVGPTNVSLTVTNMPPGKHFRVDGTSVLRGFSFMEPVLIAVQPLFGPRAGGTCLTLEGQSLSVGTSRAVLVNGTECLLARVSEGQLLCATPPGATVASVPLSLQVGGAQVPGSWTFQYREDPVVLSISPNCGYINSHITICGQHLTSAWHLVLSFHDGLRAVESRCERQLPEQQLCRLPEYVVRDPQGWVAGNLSARGDGAAGFTLPGFRFLPPPHPPSANLVPLKPEEHAIKFEYIGLGAVADCVGINVTVGGESCQHEFRGDMVVCPLPPSLQLGQDGAPLQVCVDGECHILGRVVRPGPDGVPQSTLLGILLPLLLLVAALATALVFSYWWRRKQLVLPPNLNDLASLDQTAGATPLPILYSGSDYRSGLALPAIDGLDSTTCVHGASFSDSEDESCVPLLRKESIQLRDLDSALLAEVKDVLIPHERVVTHSDRVIGKGHFGVVYHGEYIDQAQNRIQCAIKSLSRITEMQQVEAFLREGLLMRGLNHPNVLALIGIMLPPEGLPHVLLPYMCHGDLLQFIRSPQRNPTVKDLISFGLQVARGMEYLAEQKFVHRDLAARNCMLDESFTVKVADFGLARDILDREYYSVQQHRHARLPVKWMALESLQTYRFTTKSDVWSFGVLLWELLTRGAPPYRHIDPFDLTHFLAQGRRLPQPEYCPDSLYQVMQQCWEADPAVRPTFRVLVGEVEQIVSALLGDHYVQLPATYMNLGPSTSHEMNVRPEQPQFSPMPGNVRRPRPLSEPPRPT

SEQ ID NO: 275 - protein, 396 aa, Homo sapiens
MPRVKAAQAGRQSSAKRHLAEQFAVGEIITDMAKKEWKVGLPIGQGGFGCIYLADMNSSESVGSDAPCVVKVEPSDNGPLFTELKFYQRAAKPEQIQKWIRTRKLKYLGVPKYWGSGLHDKNGKSYRFMIMDRFGSDLQKIYEANAKRFSRKTVLQLSLRILDILEYIHEHEYVHGDIKASNLLLNYKNPDQVYLVDYGLAYRYCPEGVHKEYKEDPKRCHDGTIEFTSIDAHNGVAPSRRGDLEILGYCMIQWLTGHLPWEDNLKDPKYVRDSKIRYRENIASLMDKCFPEKNKPGEIAKYMETVKLLDYTEKPLYENLRDILLQGLKAIGSKDDGKLDLSVVENGGLKAKTITKKRKKEIEESKEPGVEDTEWSNTQTEEAIQTRSRTRKRVQK

SEQ ID NO: 276 - protein, 343 aa, Homo sapiens
MNIHRSTPITIARYGRSRNKTQDFEELSSIRSAEPSQSFSPNLGSPSPPETPNLSHCVSCIGKYLLLEPLEGDHVFRAVHLHSGEELVCKVFDISCYQESLAPCFCLSAHSNINQITEIILGETKAYVFFERSYGDMHSFVRTCKKLREEEAARLFYQIASAVAHCHDGGLVLRDLKLRKFIFKDEERTRVKLESLEDAYILRGDDDSLSDKHGCPAYVSPEILNTSGSYSGKAADVWSLGVMLYTMLVGRYPFHDIEPSSLFSKIRRGQFNIPETLSPKAKCLIRSILRREPSERLTSQEILDHPWFSTDFSVSNSAYGAKEVSDQLVPDVNMEENLDPFFN

SEQ ID NO: 277 - protein, 1462 aa, Homo sapiens
MAPVHGDDSLSDSGSFVSSRARREKKSKKGRQEALERLKKAKAGEKYKYEVEDFTGVYEEVDEEQYSKLVQARQDDDWIVDDDGIGYVEDGREIFDDDLEDDALDADEKGKDGKARNKDKRNVKKLAVTKPNNIKSMFIACAGKKTADKAVDLSKDGLLGDILQDLNTETPQITPPPVMILKKKRSIGASPNPFSVHTATAVPSGKIASPVSRKEPPLTPVPLKRAEFAGDDVQVESTEEEQESGAMEFEDGDFDEPMEVEEVDLEPMAAKAWDKESEPAEEVKQEADSGKGTVSYLGSFLPDVSCWDIDQEGDSSFSVQEVQVDSSHLPLVKGADEEQVFHFYWLDAYEDQYNQPGVVFLFGKVWIESAETHVSCCVMVKNIERTLYFLPREMKIDLNTGKETGTPISMKDVYEEFDEKIATKYKIMKFKSKPVEKNYAFEIPDVPEKSEYLEVKYSAEMPQLPQDLKGETFSHVFGTNTSSLELFLMNRKIKGPCWLEVKKSTALNQPVSWCKVEAMALKPDLVNVIKDVSPPPLVVMAFSMKTMQNAKNHQNEIIAMAALVHHSFALDKAAPKPPFQSHFCVVSKPKDCIFPYAFKEVIEKKNVKVEVAATERTLLGFFLAKVHKIDPDIIVGHNIYGFELEVLLQRINVCKAPHWSKIGRLKRSNMPKLGGRSGFGERNATCGRMICDVEISAKELIRCKSYHLSELVQQILKTERVVIPMENIQNMYSESSQLLYLLEHTWKDAKFILQIMCELNVLPLALQITNIAGNIMSRTLMGGRSERNEFLLLHAFYENNYIVPDKQIFRKPQQKLGDEDEEIDGDTNKYKKGRKKGAYAGGLVLDPKVGFYDKFILLLDFNSLYPSIIQEFNICFTTVQRVASEAQKVTEDGEQEQIPELPDPSLEMGILPREIRKLVERRKQVKQLMKQQDLNPDLILQYDIRQKALKLTANSMYGCLGFSYSRFYAKPLAALVTYKGREILMHTKEMVQKMNLEVIYGDTDSIMINTNSTNLEEVFKLGNKVKSEVNKLYKLLEIDIDGVFKSLLLLKKKKYAALVVEPTSDGNYVTKQELKGLDIVRRDWCDLAKDTGNFVIGQILSDQSRDTIVENIQKRLIEIGENVLNGSVPVSQFEINKALTKDPQDYPDKKSLPHVHVALWINSQGGRKVKAGDTVSYVICQDGSNLTASQRAYAPEQLQKQDNLTIDTQYYLAQQIHPVVARICEPIDGIDAVLIATWLGLDPTQFRVHHYHKDEENDALLGGPAQLTDEEKYRDCERFKCPCPTCGTENIYDNVFDGSGTDMEPSLYRCSNIDCKASPLTFTVQLSNKLIMDIRRFIKKYYDGWLICEEPTCRNRTRHLPLQFSRTGPLCPACMKATLQPEYSDKSLYTQLCFYRYIFDAECALEKLTTDHEKDKLKKQFFTPKVLQDYRKLKNTAEQFLSRSGYSEVNLSKLFAGCAVKS

SEQ ID NO: 278 - protein, 946 aa, Homo sapiens
MAAHGKLRRERGLQAEYETQVKEMRWQLSEQLRCLELQGELRRELLQELAEFMRRRAEVELEYSRGLEKLAERFSSRGGRLGSSREHQSFRKEPSLLSPLHCWAVLLQHTRQQSRESAALSEVLAGPLAQRLSHIAEDVGRLVKKSRDLEQQLQDELLEVVSELQTAKKTYQAYHMESVNAEAKLREAERQEEKRAGRSVPTTTAGATEAGPLRKSSLKKGGRLVEKRQAKFMEHKLKCTKARNEYLLSLASVNAAVSNYYLHDVLDLMDCCDTGFHLALGQVLRSYTAAESRTQASQVQGLGSLEEAVEALDPPGDKAKVLEVHATVFCPPLRFDYHPHDGDEVAEICVEMELRDEILPRAQNIQSRLDRQTIETEEVNKTLKATLQALLEVVASDDGDVLDSFQTSPSTESLKSTSSDPGSRQAGRRRGQQQETETFYLTKLQEYLSGRSILAKLQAKHEKLQEALQRGDKEEQEVSWTQYTQRKFQKSRQPRPSSQYNQRLFGGDMEKFIQSSGQPVPLVVESCIRFINLNGLQHEGIFRVSGAQLRVSEIRDAFERGEDPLVEGCTAHDLDSVAGVLKLYFRSLEPPLFPPDLFGELLASSELEDTAERVEHVSRLLWRLPAPVLVVLRYLFTFLNHLAQYSDENMMDPYNLAVCFGPTLLPVPAGQDPVALQGRVNQLVQTLIVQPDRVFPPLTSLPGPVYEKCMAPPSASCLGDAQLESLGADNDPELEAEMPAQEDDLEGVVEAVACFAYTGRTAQELSFRRGDVLRLHERASSDWWRGEHNGMRGLIPHKYITLPAGTEKQVVGAGLQTAGESGSSPEGLLASELVHRPEPCTSPEAMGPSGHRRRCLVPASPEQHVEVDKAVAQNMDSVFKELLGKTSVRQGLGPASTTSPSPGPRSPKAPPSSRLGRNKGFSRGPGAPASPSASHPQGLDTTPKPH

SEQ ID NO: 279 - protein, 416 aa, Homo sapiens
STNYPVECTEGSAGPQSLPLPILEPVKNPCSVKDQTPLQLSVEDTTSPNTKPCPPTPTTPETSPPPPPPPPSSTPCSAHLTPSSLFPSSLESSSEQKFYNFVILHARADEHIALRVREKLEALGVPDGATFCEDFQVPGRGELSCLQDAIDHSAFIILLLTSNFDCRLSLHQVNQAMMSNLTRQGSPDCVIPFLPLESSPAQLSSDTASLLSGLVRLDEHSQIFARKVANTFKPHRLQARKAMWRKEQDTRALREQSQHLDGERMQAAALNAAYSAYLQSYLSYQAQMEQLQVAFGSHMSFGTGAPYGARMPFGGQVPLGAPPPFPTWPGCPQPPPLHAWQAGTPPPPSPQPAAFPQSLPFPQSPAFPTASPAPPQSPGLQPLIIHHAQMVQLGLNNHMWNQRGSQAPEDKTQEAE

SEQ ID NO: 280 - protein, 834 aa, Homo sapiens
MKYKNLMARALYDNVPECAEELAFRKGDILTVIEQNTGGLEGWWLCSLHGRQGIVPGNRVKLLIGPMQETASSHEQPASGLMQQTFGQQKLYQVPNPQAAPRDTIYQVPPSYQNQGIYQVPTGHGTQEQEVYQVPPSVQRSIGGTSGPHVGKKVITPVRTGHGYVYEYPSRYQKDVYDIPPSHTTQGVYDIPPSSAKGPVFSVPVGEIKPQGVYDIPPTKGVYAIPPSACRDEAGLREKDYDFPPPMRQAGRPDLRPEGVYDIPPTCTKPAGKDLHVKYNCDIPGAAEPVARRHQSLSPNHPPPQLGQSVGSQNDAYDVPRGVQFLEPPAETSEKANPQERDGVYDVPLHNPPDAKGSRDLVDGINRLSFSSTGSTRSNMSTSSTSSKESSLSASPAQDKRLFLDPDTAIERLQRLQQALEMGVSSLMALVTTDWRCYGYMERHINEIRTAVDKVELFLKEYLHFVKGAVANAACLPELILHNKMKRELQRVEDSHQILSQTSHDLNECSWSLNILAINKPQNKCDDLDRFVMVAKTVPDDAKQLTTTINTNAEALFRPGPGSLHLKNGPESIMNSTEYPHGGSQGQLLHPGDHKAQAHNKALPPGLSKEQAPDCSSSDGSERSWMDDYDYVHLQGKEEFERQQKELLEKENIMKQNKMQLEHHQLSQFQLLEQEITKPVENDISKWKPSQSLPTTNSGVSAQDRQLLCFYYDQCETHFISLLNAIDALFSCVSSAQPPRIFVAHSKFVILSAHKLVFIGDTLTRQVTAQDIRNKVMNSSNQLCEQLKTIVMATKMAALHYPSTTALQEMVHQVTDLSRNAQLFKRSLLEMATF

SEQ ID NO: 281 - protein, 369 aa, Homo sapiens
SVPRDSGAMLGLKVVGGKMTESGRLCAFITKVKKGSLADTVGHLRPGDEVLEWNGRLLQGATFEEVYNIILESKPEPQVELVVSRPIGDIPRIPDSTHAQLESSSSSFESQKMDRPSISVTSPMSPGMLRDVPQFLSGQLSIKLWFDKVGHQLIVTILGAKDLPSREDGRPRNPYVKIYFLPDRSDKNKRRTKTVKKTLEPKWNQTFIYSPVHRREFRERMLEITLWDQARVREEESEFLGEILIELETALLDDEPHWYKLQTHDVSSLPLPHPSPYMPRRQLHGESPTRRLQRSKRISDSEVSDYDCDDGIGVVSDYRHDGRDLQSSTLSVPEQVMSSNHCSPSGSPHRVDVIGRTRSWSPSVPPPQR

SEQ ID NO: 282 - protein, 1085 aa, Homo sapiens
EIEQNSAMAPRKRGGRGISFIFCCFRNNDHPEITYRLRNDSNFALQTMEPALPMPPVEELDVMFSELVDELDLTDKHREAMFALPAEKKWQIYCSKKKDQEENKGATSWPEFYIDQLNSMAARKSLLALEKEEEEERSKTIESLKTALRTKPMRFVTRFIDLDGLSCILNFLKTMDYETSESRIHTSLIGCIKALMNNSQGRAHVLAHSESINVIAQSLSTENIKTKVAVLEILGAVCLVPGGHKKVLQAMLHYQKYASERTRFQTLINDLDKSTGRYRDEVSLKTAIMSFINAVLSQGAGVESLDFRLHLRYEFLMLGIQPVIDKLREHENSTLDRHLDFFEMLRNEDELEFAKRFELVHIDTKSATQMFELTRKRLTHSEAYPHFMSILHHCLQMPYKRSGNTVQYWLLLDRIIQQIVIQNDKGQDPDSTPLENFNIKNVVRMLVNENEVKQWKEQAEKMRKEHNELQQKLEKKERECDAKTQEKEEMMQTLNKMKEKLEKETTEHKQVKQQVADLTAQLHELSRRAVCASIPGGPSPGAPGGPFPSSVPGSLLPPPPPPPLPGGMLPPPPPPLPPGGPPPPPGPPPLGAIMPPPGAPMGLALKKKSIPQPTNALKSFNWSKLPENKLEGTVWTEIDDTKVFKILDLEDLERTFSAYQRQQDFFVNSNSKQKEADAIDDTLSSKLKVKELSVIDGRRAQNCNILLSRLKLSNDEIKRAILTMDEQEDLPKDMLEQLLKFVPEKSDIDLLEEHKHELDRMAKADRFLFEMSRINHYQQRLQSLYFKKKFAERVAEVKPKVEAIRSGSEEVFRSGALKQLLEVVLAFGNYMNKGQRGNAYGFKISSLNKIADTKSSIDKNITLLHYLITIVENKYPSVLNLNEELRDIPQAAKVNMTELDKEISTLRSGLKAVETELEYQKSQPPQPGDKFVSVVSQFITVASFSFSDVEDLLAEAKDLFTKAVKHFGEEAGKIQPDEFFGIFDQFLQAVSEAKQENENMRKKKEEEERRARMEAQLKEQRERERKMRKAKENSEESGEFDDLVSALRSGEVFDKDLSKLKRNRKRITNQMTDSSRERPITKLNF

SEQ ID NO: 283 - protein, 376 aa, Homo sapiens
METLSNASGTFAIRLLKILCQDNPSHNVFCSPVSISSALAMVLLGAKGNTATQMAQALSLNTEEDIHRAFQSLLTEVNKAGTQYLLRTANRLFGEKTCQFLSTFKESCLQFYHAELKELSFIRAAEESRKHINTWVSKKTEGKIEELLPGSSIDAETRLVLVNAIYFKGKWNEPFDETYTREMPFKINQEEQRPVQMMYQEATFKLAHVGEVRAQLLELPYARKELSLLVLLPDDGVELSTVEKSLTFEKLTAWTKPDCMKSTEVEVLLPKFKLQEDYDMESVLRHLGIVDAFQQGKADLSAMSAERDLCLSKFVHKSFVEVNEEGTEAAAASSCFVVAECCMESGPRFCADHPFLFFIRHNRANSILFCGRFSSP

SEQ ID NO: 284 - protein, 1516 aa, Homo sapiens [sequence omitted]

SEQ ID NO: 285 - protein, 1097 aa, Homo sapiens
AISNHLKEWTLLAMSSQSHPDGLSGRDQPVELLNPARVNHMPSTVDVATALPLQVAPSAVPMDLRLDHQFSLPVAEPALREQQLQQELLALKQKQQIQRQILIAEFQRQHEQLSRQHEAQLHEHIKQQQEMLAMKHQQELLEHQRKLERHRQEQELEKQHREQKLQQLKNKEKGKESAVASTEVKMKLQEFVLNKKKALAHRNLNHCISSDPRYWYGKTQHSSLDQSSPPQSGVSTSYNHPVLGMYDAKDDFPLRKTASEPNLKLRSRLKQKVAERRSSPLLRRKDGPVVTALKKRPLDVTDSACSSAPGSGPSSPNNSSGSVSAENGIAPAVPSIPAETSLAHRLVAREGSAAPLPLYTSPSLPNITLGLPATGPSAGTAGQQDTERLTLPALQQRLSLFPGTHLTPYLSTSPLERDGGAAHSPLLQHMVLLEQPPAQAPLVTGLGALPLHAQSLVGADRVSPSIHKLRQHRPLGRTQSAPLPQNAQALQHLVIQQQHQQFLEKHKQQFQQQQLQMNKIIPKPSEPARQPESHPEETEEELREHQALLDEPYLDRLPGQKEAHAQAGVQVKQEPIESDEEEAEPPREVEPGQRQPSEQELLFRQQALLLEQQRIHQLRNYQASMEAAGIPVSFGGHRPLSRAQSSPASATFPVSVQEPPTKPRFTTGLVYDTLMLKHQCTCGSSSSHPEHAGRIQSIWSRLQETGLRGKCECIRGRKATLEELQTVHSEAHTLLYGTNPLNRQKLDSKKLLGSLASVFVRLPCGGVGVDSDTIWNEVHSAGAARLAVGCVVELVFKVATGELKNGFAVVRPPGHHAEESTPMGFCYFNSVAVAAKLLQQRLSVSKILIVDWDVHHGNGTQQAFYSDPSVLYMSLHRYDDGNFFPGSGAPDEVGTGPGVGFNVNMAFTGGLDPPMGDAEYLAAFRTVVMPIASEFAPDVVLVSSGFDAVEGHPTPLGGYNLSARCFGYLTKQLMGLAGGRIVLALEGGHDLTAICDASEACVSALLGNELDPLPEKVLQQRPNANAVRSMEKVMEIHSKYWRCLQRTTSTAGRSLIEAQTCENEEAETVTAMASLSVGVKPAEKRPDEEPMEEEPPL

SEQ ID NO: 286 - protein, 386 aa, Homo sapiens
LGPEAWGSPTPPPTPAAPPPPPPPGAPGGSQDTCTSCGGFRRPEELGRVDGDFLEAVKRHILSRLQMRGRPNITHAVPKAAMVTALRKLHAGKVREDGRVEIPHLDGHASPGADGQERVSEIISFAETDGLASSRVRLYFFISNEGNQNLFVVQASLWLYLKLLPYVLEKGSRRKVRVKVYFQEQGHGDRWNMVEKRVDLKRSGWHTFPLTEAIQALFERGERRLNLDVQCDSCQELAVVPVFVDPGEESHRPFVVVQARLGDSRHRIRKRGLECDGRTNLCCRQQFFIDFRLIGWNDWIIAPTGYYGNYCEGSCPAYLAGVPGSASSFHTAVVNQYRMRGLNPGTVNSCCIPTKLSTMSMLYFDDEYNIVKRDVPNMIVEECGCA

SEQ ID NO: 287 - protein, 145 aa, Homo sapiens
MRAAGTLLAFCCLVLSTTGGPSPDTCSQDLNSRVKPGFPKTIKTNDPGVLQAARYSVEKFNNCTNDMFLFKESRITRALVQIVKGLKYMLEVEIGRTTCKKNQHLRLDDCDFQTNHTLKQTLSCYSEVWVVPWLQHFEVPVLRCH

SEQ ID NO: 288 - protein, 509 aa, Homo sapiens
RPAAPALESPPRLGVASRGGRAPRGRGIRLPAQASATREREPRWSPFQRWRKTWAVLYPASPHGVARLEFFDHKGSSSGGGRGSSRRLDCKVIRLAECVSVAPVTVETPPEPGATAFRLDTAQRSHLLAADAPSSAAWVQTLCRNAFPKGSWTLAPTDNPPKLSALEMLENSLYSPTWEGSQFWVTVQRTEAAERCGLHGSYVLRVEAERLTLLTVGAQSQILEPLLSWPYTLLRRYGRDKVMFSFEAGRRCPSGPGTFTFQTAQGNDIFQAVETAIHRQKAQGKAGQGHDVLRADSHEGEVAEGKLPSPPGPQELLDSPPALYAEPLDSLRIAPCPSQDSLYSDPLDSTSAQAGEGVQRKKPLYWDLYEHAQQQLLKAKLTDPKEDPIYDEPEGLAPVPPQGLYDLPREPKDAWWCQARVKEEGYELPYNPATDDYAVPPPRSTKPLLAPKPQGPAFPEPGTATGSGIKSHNSALYSQVQKSGASGSWDCGLSRVGTDKTGVKSEGST

SEQ ID NO: 289 - protein, 376 aa, Homo sapiens
MESYDIIANQPVVIDNGSGVIKAGFAGDQIPKYCFPNYVGRPKHMRVMAGALEGDLFIGPKAEEHRGLLTIRYPMEHGVVRDWNDMERIWQYVYSKDQLQTFSEEHPVLLTEAPLNPSKNREKAAEVFFETFNVPALFISMQAVLSLYATGRTTGVVLDSGDGVTHAVPIYEGFAMPHSIMRVDIAGRDVSRYLRLLLRKEGVDFHTSAEFEVVRTIKERACYLSINPQKDEALETEKVQYTLPDGSTLDVGPARFRAPELLFQPDLVGDESEGLHEVVAFAIHKSDMDLRRTLFANIVLSGGSTLFKGFGDRLLSEVKKLAPKDIKIKISAPQERLYSTWIGGSILASLDTFKKMWVSKKEYEEDGSRAIHRKTF

SEQ ID NO: 290 - protein, 214 aa, Homo sapiens [sequence omitted]

SEQ ID NO: 291 - protein, 406 aa, Homo sapiens
MRLFRWLLKQPVPKQIERYSRFSPSPLSIKQFLDFGRDNACEKTSYMFLRKELPVRLANTMREVNLLPDNLLNRPSVGLVQSWYMQSFLELLEYENKSPEDPQVLDNFLQVLIKVRNRHNDVVPTMAQGVIEYKEKFGFDPFISTNIQYFLDRFYTNRISFRMLINQHTLLFGGDTNPVHPKHIGSIDPTCNVADVVKDAYETAKMLCEQYYLVAPELEVEEFNAKAPDKPIQVVYVPSHLFHMLFELFKNSMRATVELYEDRKEGYPAVKTLVTLGKEDLSIKISDLGGGVPLRKIDRLFNYMYSTAPRPSLEPTRAAPLAGFGYGLPISRLYARYFQGDLKLYSMEGVGTDAVIYLKALSSESFERLPVFNKSAWRHYKTTPEADDWSNPSSEPRDASKYKAKQ

SEQ ID NO: 292 - protein, 14 aa, Homo sapiens
APSARLEEAVWRPY

SEQ ID NO: 293 - protein, 267 aa, Homo sapiens
MASPSKGNDLFSPDEEGPAVVAGPGPGPGGAEGAAEERRVKVSSLPFSVEALMSDKKPPKEASPLPAESASAGATLRPLLLSGHGAREAHSPGPLVKPFETASVKSENSEDGAAWMQEPGRYSPPPRHTSPTTCTLRKHKTNRKPRTPFTTSQLLALERKFRQKQYLSIAERAEFSSSLNLTETQVKIWFQNRRAKAKRLQEAELEKLKMAAKPMLPSSFSLPFPISSPLQAASIYGASYPFHRPVLPIPPVGLYATPVGYGMYHLS

SEQ ID NO: 294 - protein, 205 aa, Homo sapiens
MEFLWAPLLGLCCSLAAADRHTVFWNSSNPKFRNEDYTIHVQLNDYVDIICPHYEDHSVADAAMEQYILYLVEHEEYQLCQPQSKDQVRWQCNRPSAKHGPEKLSEKFQRFTPFTLGKEFKEGHSYYYISKPIHQHEDRCLRLKVTVSGKITHSPQAHVNPQEKRLAADDPEVRVLHSIGHSAAPRLFPLAWTVLLLPLLLLQTP

SEQ ID NO: 295 - protein, 205 aa, Homo sapiens
MAASTASHRPIKGILKNKTSTTSSMVASAEQPRGNVDEELSKKSQKWDEMNILATYHPADKDYGLMKIDEPSTPYHSMMGDDEDACSDTEATEAMAPDILARKLAAAEGLEPKYRIQEQESSGEEDSDLSPEEREKKRQFEMKRKLHYNEGLNIKLARQLISKDLHDDDEDEEMLETADGESMNTEESNQGSTPSDQQQNKLRSS

SEQ ID NO: 296 - protein, 340 aa, Homo sapiens
METSALKQQEQPAATKIRNLPWVEKYRPQTLNDLISHQDILSTIQKFINEDRLPHLLLYGPPGTGKTSTILACAKQLYKDKEFGSMVLELNASDDRGIDIIRGPILSFASTRTIFKKGFKLVILDEADAMTQDAQNALRRVIEKFTENTRFCLICNYLSKIIPALQSRCTRFRFGPLTPELMVPRLEHVVEEEKVDISEDGMKALVTLSSGDMRRALNILQSTNMAFGKVTEETVYTCTGHPLKSDIANILDWMLNQDFTTAYRNITELKTLKGLALHDILTEIHLFVHRVDFPSSVRIHLLTKMADIEYRLSVGTNEKIQLSSLIAAFQVTRDLIVAEA

SEQ ID NO: 297 - protein, 380 aa, Homo sapiens
ASPPACPSEEDESLKGCELYVQLHGIQQVLKDCIVHLCISKPERPMKFLREHFEKLEKEENRQILARQKSNSQSDSHDEEVSPTPPNPVVKARRRRGGVSAEVYTEEDAVSYVRKVIPKDYKTMTALAKAISKNVLFAHLDDNERSDIFDAMFPVTHIAGETVIQQGNEGDNFYVVDQGEVDVYVNGEWVTNISEGGSFGELALIYGTPRAATVKAKTDLKLWGIDRDSYRRILMGSTLRKRKMYEEFLSKVSILESLEKWERLTVADRLEPVQFEDGEKIVVQGEPGDDFYIITEGTASVLQRRSPNEEYVEVGRLGPSDYFGEIALLLNRPRAATVVARGPLKCVKLDRPRFERVLGPCSEILKRNIQRYNSFISLTV

SEQ ID NO: 298 - protein, 360 aa, Homo sapiens
MAAPAAATAMGNAPAKKDTEQEESVNEFLAKARGDFLYRWGNPAQNTASSDQFERLRTLGMGSFGRVMLVRHQETGGHYAMKILNKQKVVKMKQVEHILNEKRILQAIDFPFLVKLQFSFKDNSYLYLVMEYVPGGEMFSRLQRVGRFSEPHACFYAAQVVLAVQYLHSLDLIHRDLKPENLLIDQQGYLQVTDFGFAKRVKGRTWTLCGTPEYLAPEIILSKGYNKAVDWWALGVLIYEMAVGFPPFYADQPIQIYEKIVSGRVRFPSKLSSDLKDLLRSLLQVDLTKRFGNLRNGVGDIKNHKWFATTSWIAIYEKKVEAPFIPKYTGPGDASNFDDYEEEELRISINEKCAKEFSEF

SEQ ID NO: 299 - protein, 916 aa, Homo sapiens [sequence omitted]

SEQ ID NO: 300 - protein, 430 aa, Homo sapiens
MEAAVAVLEMSDIVLLITDIRHPVVNFPPALYEYVTGELGLALVLVLNKVDLAPRRLVVAWKHYFHQHYPQLHVVLFTSFPRDPRTPQDPSSVLKKSRRRGRGWTRALGPEQLLRACEAITVGKVDLSSWREKIARDAGATWGNGSGEEEEEEDGPAVLVEQQQTDSAMEPTGPTQERYKDGVVTIGCVGFPNVGKSSLINGLVGRKVVSVSRTPGHTRYFQTYFLTPSVKLCDCPGLIFPSLLPRQLQVLAGIYPIAQIQEPYTAVGYLASRIPVQALLHLRHPEAEDPSAEHPWCAWDICEAWAEKRGYKTAKAARNDVYRAANSLLRLAVDGRVSLCFHPPGYSEQKGTWESHPETTELVVLQGRVGPAGDEEEEEEEELSSSCEEEGEEDRDADEEGEGDEETPTSAPGSSLAGRNPYALLGEDEC

SEQ ID NO: 301 - protein, 171 aa, Homo sapiens
MAKFVIRPATAADCSDILRLIKELAKYEYMEEQVILTEKDLLEDGFGEHPFYHCLVAEVPKEHWTPEGHSIVGFAMYYFTYDPWIGKLLYLEDFFVMSDYRGFGIGSEILKNLSQVAMRCRCSSMHFLVAEWNEPSINFYKRRGASDLSSEEGWRLFKIDKEYLLKMATEE

SEQ ID NO: 302 - protein, 122 aa, Homo sapiens
MEASALTSSAVTSVAKVVRVASGSAVVLPLARIATVVIGGVVAMAAVPMVLSAMGFTAAGIASSSIAAKMMSAAAIANGGGVASGSLVGTLQSLGATGLSGLTKFILGSIGSAIAAVIARFY

SEQ ID NO: 303 - protein, 1218 aa, Homo sapiens [sequence omitted]

SEQ ID NO: 304 - protein, 363 aa, Homo sapiens
MQAFLKGTSISTKPPLTKDRGVAASAGSSGENKKAKPVPWVEKYRPKCVDEVAFQEEVVAVLKKSLEGADLPNLLFYGPPGTGKTSTILAAARELFGPELFRLRVLELNASDERGIQVVREKVKNFAQLTVSGSRSDGKPCPPFKIVILDEADSMTSAAQAALRRTMEKESKTTRFCLICNYVSRIIEPLTSRCSKFRFKPLSDKIQQQRLLDIAKKENVKISDEGIAYLVKVSEGDLRKAITFLQSATRLTGGKEITEKVITDIAGVIPAEKIDGVFAACQSGSFDKLEAVVKDLIDEGHAATQLVNQLHDVVVENNLSDKQKSIITEKLAEVDKCLADGADEHLQLISLCATVMQQLSQNC

SEQ ID NO: 305 - protein, 841 aa, Homo sapiens
MLERKYGGRLVTRHAARTIQTAFRQYQMNKNFERLRSSMSENRMSRRIVLSNMRMQFSFEGPEKVHSSYFEGKQVSVTNDGSQLGALVSPECGDLSEPTTLKSPAPSSDFADAITELEDAFSRQVKSLAESIDDALNCRSLHTEEAPALDAARARDTEPQTALHGMDHRKLDEMTASYSDVTLYIDEEELSPPLPLSQAGDRPSSTESDLRLRAGGAAPDYWALAHKEDKADTDTSCRSTPSLERQEQRLRVEHLPLLTIEPPSDSSVDLSDRSERGSLKRQSAYERSLGGQQGSPKHGPHSGAPKSLPREEPELRPRPPRPLDSHLAINGSANRQSKSESDYSDGDNDSINSTSNSNDTINCSSESSSRDSLREQTLSKQTYHKEARNSWDSPAFSNDVIRKRHYRIGLNLFNKKPEKGVQYLIERGFVPDTPVGVAHFLLQRKGLSRQMIGEFLGNRQKQFNRDVLDCVVDEMDFSTMELDEALRKFQAHIRVQGEAQKVERLIEAFSQRYCICNPGVVRQFRNPDTIFILAFAIILLNTDMYSPNVKPERKMKLEDFIKNLRGVDDGEDIPREMLMGIYERIRKRELKTNEDHVSQVQKVEKLIVGKKPIGSLHPGLGCVLSLPHRRLVCYCRLFEVPDPNKPQKLGLHQREIFLFNDLLVVTKIFQKKKNSVTYSFRQSFSLYGMQVLLFENQYYPNGIRLTSSVPGADIKVLINFNAPNPQDRKKFTDDLRESIAEVQEMEKHRIESELEKQKGVVRPSMSQCSSLKKESGNGTLSRACLDDSYASGEGLKRSALSSSLRDLSEAGKRGRRSSAGSLESNVEFQPFEPLQPSVLCS

SEQ ID NO: 306 - protein, 454 aa, Homo sapiens
MDPGQQPPPQPAPQGQGQPPSQPPQGQGPPSGPGQPAPAATQAAPQAPPAGHQIVHVRGDSETDLEALFNAVMNPKTANVPQTVPMRLRKLPDSFFKPPEPKSHSRQASTDAGTAGALTPQHVRAHSSPASLQLGAVSPGTLTPTGVVSGPAATPTAQHLRQSSFEIPDDVPLPAGWEMAKTSSGQRYFLNHIDQTTTWQDPRKAMLSQMNVTAPTSPPVQQNMMNSASAMNQRISQSAPVKQPPPLAPQSPQGGVMGGSNSNQQQQMRLQQLQMEKERLRLKQQELLRQVRPQELALRSQLPTLEQDGGTQNPVSSPGMSQELRTMTTNSSDPFLNSGTYHSRDESTDSGLSMSSYSVPRTPDDFLNSVDEMDTGDTINQSTLPSQQNRFPDYLEAIPGTNVDLGTLEGDGMNIEGEELMPSLQEALSSDILNDMESVLAATKLDKESFLTWL

SEQ ID NO: 307 - protein, 1014 aa, Homo sapiens
MRVPVFEDIKDETEEEKIGEEENEEDQVFYKPVIEDLSMELARKCTELISDIRYKEEFKKSKDKCTFVTDSPMLNHVKNIGAFISEAKYKGTIKADLSNSLYKRMPATIDSVFAGEVTQLQSEVAYKQKHDAAKGFSDYAHMKEPPEVKHAMEVNKHQSNISYRKDVQDTHTYSAELDRPDIKMATQISKIISNAEYKKGQGIMNKEPAVIGRPDFEHAVEASKLSSQIKYKEKFDNEMKDKKHHYNPLESASFRQNQLAATLASNVKYKKDIQNMHDPVSDLPNLLFLDHVLKASKMLSGREYKKLFEENKGMYHFDADAVEHLHHKGNAVLQSQVKYKEEYEKNKGKPMLEFVETPSYQASKEAQKMQSEKVYKEDFEKEIKGRSSLDLDKTPEFLHVKYITNLLREKEYKKDLENEIKGKGMELNSEVLDIQRAKRASEMASEKEYKKDLESIIKGKGMQAGTDTLEMQHAKKAAEIASEKDYKRDLETEIKGKGMQVSTDTLDVQRAKKASEMASQKQYKKDLENEIKGKGMQVSMDIPDILRAKRTSEIYSQRKYKDEAEKMLSNYSTIADTPEIQRIKTTQQNISAVFYKKEVGAGTAVKDSPEIERVKKNQQNISSVKYKEEIKHATAISDPPELKRVKENQKNISNLQYKEQNYKATPVSMTPEIERVRRNQEQLSAVKYKGELQRGTAISDPPELKRAKENQKNISNVYYRGQLGRATTLSVTPEMERVKKNQENISSVKYTQDHKQMKGRPSLILDTPAMRHVKEAQNHISMVKYHEDFEKTKGRGFTPVVDDPVTERVRKNTQVVSDAAYKGVHPHIVEMDRRPGIIVDLKVWRTDPGSIFDLDPLEDNIQSRSLHMLSEKASHYRRHWSRSHSSSTFGTGLGDDRSEISEIYPSFSCCSEVTRPSDEGAPVLPGAYQQSHSQGYGYMHQTSVSSMRSMQHSPNLRTYRAMYDYSAQDEDEVSFRDGDYIVNVQPIDDGWMYGTVQRTGRTGMLPANYIEFVN

SEQ ID NO: 308 - protein, 674 aa, Homo sapiens [sequence omitted]

SEQ ID NO: 309 - protein, 475 aa, Homo sapiens
MTPGTQSPFFLLLLLTVLTVVTGSGHASSTPGGEKETSATQRSSVPSSTEKNAVSMTSSVLSSHSPGSGSSTTQGQDVTLAPATEPASGSAATWGQDVTSVPVTRPALGSTTPPAHDVTSAPDNKPAPGSTAPPAHGVTSAPDTRPAPGSTAPPAHGVTSAPDNRPALGSTAPPVHNVTSASGSASGSASTLVHNGTSARATTTPASKSTPFSIPSHHSDTPTTLASHSTKTDASSTHHSTVPPLTSSNHSTSPQLSTGVSFFFLSFHISNLQFNSSLEDPSTDYYQELQRDISEMFLQIYKQGGFLGLSNIKFRPGSVVVQLTLAFREGTINVHDVETQFNQYKTEAASRYNLTISDVSVSDVPFPFSAQSGAGVPGWGIALLVLVCVLVALAIVYLIALAVCQCRRKNYGQLDIFPARDTYHPMSEYPTYHTHGRYVPPSSTDRSPYEKVSAGNGGSSLSYTNPAVAATSANL

SEQ ID NO: 310 - protein, 183 aa, Homo sapiens
MRAAYLFLLFLPAGLLAQGQYDLDPLPPFPDHVQYTHYSDQIDNPDYYDYQEVTPRPSEEQFQFQSQQQVQQEVIPAPTPEPGNAELEPTEPGPLDCREEQYPCTRLYSIHRPCKQCLNEVCFYSLRRVYVINKEICVRTVCAHEELLRADLCRDKFSKCGVMASSGLCQSVAASCARSCGSC

SEQ ID NO: 311 - protein, 1074 aa, Homo sapiens
MKGTCVIAWLFSSLGLWRLAHPEAQGTTQCQRTEHPVISYKEIGPWLREFRAKNAADFSQLTFDPGQKELVVGARNYLFRLQLEDLSLIQAVEWECDEATKKACYSKGKSKEECQNYIRVLLVGGDRLFTCGTNAFTPVCTNRSLSNLAEIHDQISGMARCPYSPQHNSTALLTAGGELYAATAMDFPGRDPAIYRSLGILPPLRTAQYNSKWLNEPNFVSSYDIGNFTYFFFRENAVEHDCGKTVFSRAARVCKNDIGGRFLLEDTWTTFMKARLNCSRPGEVPFYYNELQSTFFLPELDLIYGIFTTNVNSIAASAVCVFNLSAIAQAFSGPFKYQENSRSAWLPYPNPNPHFQCGTVDQGLYVNLTERNLQDAQKFILVHEVVQPVTTVPSFMEDNSRFSHVAVDVVQGREALVHIIYLATDYGTIKKVRVPLNQTSSSCLLEEIELFPERRREPIRSLQILHSQSVLFVGLREHVVKIPLKRCQFYRTRSTCIGAQDPYCGWDVVMKKCTSLEESLSMTQWEQSISACPTRNLTVDGHFGVWSPWTPCTHTDGSAVGSCLCRTRSCDSPAPQCGGWQCEGPGMEIANCSRNGGWTPWTSWSPCSTTCGIGFQVRQRSCSNPTPRHGGRVCVGQNREERYCNEHLLCPPHMFWTGWGPWERCTAQCGGGIQARRRICENGPDCAGCNVEYQSCNTNPCPELKKTTPWTPWTPVNISDNGDHYEQRFRYTCKARLADPNLLEVGRQRIEMRYCSSDGTSGCSTDGLSGDFLRAGRYSAHTVNGAWSAWTSWSQCSRDCSRGIRNRKRVCNNPEPKYGGMPCLGPSLEYQECNTLPCPVDGVWSCWSPWTKCSATCGGGHYMRTRSCSNPAPAYGGDICLGLHTEEALCNTQPCPESWSEWSDWSECEASGVQVRARQCILLFPMGSQCSGNTTESRPCVFDSNFIPEVSVARSSSVEEKRCGEFNMFHMIAVGLSSSILGCLLTLLVYTYCQRYQQQSHDATVIHPVSPAPLNTSITNHINKLDKYDSVEAIKAFNKNNLILEERNKYFNPHLTGKTYSNAYFTDLNNYDEY

SEQ ID NO: 312 - protein, 1237 aa, Homo sapiens
RMALDEVWDSSHFALQPGRAEDGPGASLALRILAARLPDSGVYVCHARNAHGHAQAGALLQVHQPPESPPADPDEAPAPVVEPLKCAPKTFWVNEGKHAKFRCYVMGKPEPEIEWHWEGRPLLPDRRRLMYRDRDGGFVLKVLYCQAKDRGLYVCAARNSAGQTLSAVQLHVKEPRLRFTRPLQDVEGREHGIAVLECKVPNSRIPTAWFREDQRLLPCRKYEQIEEGTVRRLIIHRLKADDDGIYLCEMRGRVRTVANVTVKGPILKRLPRKLDVLEGENAVLLVETLEAGVEGRWSRDGEELPVICQSSSGHMHALVLPGVTREDAGEVTFSLGNSRTTTLLRVKCVKHSPPGPPILAEMFKGHKNTVLLTWKPPEPAPETPFIYRLERQEVGSEDWIQCFSIEKAGAVEVPGDCVPSEGDYRFRICTVSGHGRSPHVVFHGSAHLVPTARLVAGLEDVQVYDGEDAVFSLDLSTIIQGTWFLNGEELKSNEPEGQVEPGALRYRIEQKGLQHRLILHAVKHQDSGALVGFSCPGVQDSAALTIQESPVHILSPQDKVSLTFTTSERVVLTCELSRVDFPATWYKDGQKVEESELLVVKMDGRKHRLILPEAKVQDSGEFECRTEGVSAFFGVTVQDPPVHIVDPREHVFVHAITSECVMLACEVDREDAPVRWYKDGQEVEESDFVVLENEGPHRRLVLPATQPSDGGEFQCVAGDECAYFTVTITDVSSWIVYPSGKVYVAAVRLERVVLTCELCRPWAEVRWTKDGEEVVESPALLLQKEDTVRRLVLPAVQLEDSGEYLCEIDDESASFTVTVTEPPVRIIYPRDEVTLIAVTLECVVLMCELSREDAPVRWYKDGLEVEESEALVLERDGPRCRLVLPAAQPEDGGEFVCDAGDDSAFFTVTVTEPPVQFLALETTPSPLCVAPGEPVVLSCELSRAGAPVVWSHNGRPVQEGEGLELHAEGPRRVLCIQAAGPAHAGLYTCQSGAAPGAPSLSFTVQVAEPPVRVVAPEAAQTRVRSTPGGDLELVVHLSGPGGPVRWYKDGERLASQGRVQLEQAGARQVLRVQGARSGDAGEYLCDAPQDSRIFLVSVEEPLLVKLVSDLTPLTVHEGDDATFRCEVSPPDADVTWLRNGAVVTPGPQRQSCCSYGGCRMCGQRKARTCVSKWRQAEWVQRGPCAGCEVGSPCPTTLACPWPRMGTSTASSSMVSYWPTRAPTAARATTIAPWPGSA

SEQ ID NO: 313 - protein, 1272 aa, Homo sapiens
DLQYVKKQIFTNTVARFAADLAEELVFEGIMEVCQFSYPQTPASPQCGSFDFEDKVVKLYAKDLSESVIQEAFIELSQVDVTFTTKAAVSVSTDNIKYVSAESVVPSTQAVTFSPSFHNQAIMVTKPVQEYKKEYTVQQALFCTSGIVTSIPVPLAGSALLPYHISSTACQAKAHLSSDDSNSNGDSAQVHIATKNREEKAACLRNICLPSEHNPGNQNDFKPTNDDIEMQSSSKLPNDPAIISNFSAAVVHTIVNETLESMTSLEVTKMVDERTDYLTKSLKEKTPPFSHCDQAVLQCSEASSNKDMFADRLSKSIIKHSIDKSKSVIPNIDKNAVYKESLPVSGEESQLTPEKSPKFPDSQNQLTHCSLSAAKDCVPECKVSMVHGSSLETLPSCPAVTGQKSDLKESAKDQPLKKHNLNSTSLEALSFGQENPFPHSHTFSSTALTCVDGLHVEDKQKVRDRNVIPDTPPSTPLVPSRASSEWDIKKLTKKLKGELAKEFAPATPPSTPHNSSVGSLSENEQNTIEKEEFMLKLMRSLSEEVESSESGELPEVDVKSEHSGKKVQFAEALATHILSLATEMAASHLDNKIIQEPKVKNPCLNVQSQRSVSPTFLNPSDENLKTLCNFAGDLAAEVITEAEKIAKVRNCMLFKQKKNSCYADGDEDYKVEEKLDIEAVVHPREVDPFILSLPPSSCMSGLMYKYPSCESVTDEYAGHLIQILKQEGGNSELIMDQYANRLAYRSVKSGLQEAAKTTKVQCNSRMFPVPSSQVKTNKELLMFSNKEHHQEADKKRQSKRNEGYFCKNQTCERTLDPYRNEVSQLYSFSTSLVHSITKDAKEELTASLVGLPKSLTDSCLFEKSGYEEDNECHVTPELPKSLQPSSQNHRFYHSTGSLNGYGCGDNVVQAVEQYAKKVVDDTLELTLGSTVFRVSETTKSADRVTYAEKLSPLTGQACRYCDLKELHNCTGNSSQHFFRQGSLASSKPASNPKFSSRYQKSRIFHLSVPQIHVNLDKKAVLAEKIVAEAIEKAERELSSTSLAADSGIGQEGASFAESLATETMTAAVTNVGHAVSSSKEIEDFQSTESVSSQQMNLSIGDDSTGSWSNLSFEDEHQDESSSFHHLSESNGNSSSWSSLGLEGDLYEDNLSFPTSDSDGPDDKDEEHEDEVEGLGQDGKTLLITNIDMEPCTVDPQLRIILQWLIASEAEVAELYFHDSANKEFMLLSKQLQEKGWKVGDLLQAVLQYYEVMEKASSEERCKSLFDWLLENA

SEQ ID NO: 314 - protein, 700 aa, Homo sapiens [sequence omitted]

SEQ ID NO: 315 - protein, 194 aa, Homo sapiens [sequence omitted]

SEQ ID NO: 316 - protein, 509 aa, Homo sapiens [sequence omitted]

SEQ ID NO: 317 - protein, 579 aa, Homo sapiens
MEVNAGGVIAYISSSSSASSPASCHSEGSENSFQSSSSSVPSSPNSSNSDTNGNPKNGDLANIEGILKNDRIDCSMKTSKSSAPGMTKSHSGVTKFSGMVLLCKVCGDVASGFHYGVHACEGCKGFFRRSIQQNIQYKKCLKNENCSIMRMNRNRCQQCRFKKCLSVGMSRDAVRFGRIPKREKQRMLIEMQSAMKTMMNSQFSGHLQNDTLVEHHEQTALPAQEQLRPKPQLEQENIKSSSPPSSDFAKEEVIGMVTRAHKDTFMYNQEQQENSAESMQPQRGERIPKNMEQYNLNHDHCGNGLSSHFPCSESQQHLNGQFKGRNIMHYPNGHAICIANGHCMNFSNAYTQRVCDRVPIDGFSQNENKNSYLCNTGGRMHLVCPMSKSPYVDPHKSGHEIWEEFSMSFTPAVKEVVEFAKRIPGFRDLSQHDQVNLLKAGTFEVLMVRFASLFDAKERTVTFLSGKKYSVDDLHSMGAGDLLNSMFEFSEKLNALQLSDEEMSLFTAVVLVSADRSGIENVNSVEALQETLIRALRTLIMKNHPNEASIFTKLLLKLPDLRSLNNMHSEELLAFKVHP

SEQ ID NO: 318 - protein, 537 aa, Homo sapiens
MGCVQCKDKEATKLTEERDGSLNQSSGYRYGTDPTPQHYPSFGVTSIPNYNNFHAAGGQGLTVFGGVNSSSHTGTLRTRGGTGVTLFVALYDYEARTEDDLSFHKGEKFQILNSSEGDWWEARSLTTGETGYIPSNYVAPVDSIQAEEWYFGKLGRKDAERQLLSFGNPRGTFLIRESETTKGAYSLSIRDWDDMKGDHVKHYKIRKLDNGGYYITTRAQFETLQQLVQHYSERAAGLCCRLVVPCHKGMPRLTDLSVKTKDVWEIPRESLQLIKRLGNGQFGEVWMGTWNGNTKVAIKTLKPGTMSPESFLEEAQIMKKLKHDKLVQLYAVVSEEPIYIVTEYMNKGSLLDFLKDGEGRALKLPNLVDMAAQVAAGMAYIERMNYIHRDLRSANILVGNGLICKIADFGLARLIEDNEYTARQGAKFPIKWTAPEAALYGRFTIKSDVWSFGILLTELVTKGRVPYPGMNNREVLEQVERGYRMPCPQDCPISLHELMIHCWKKDPEERPTFEYLQSFLEDYFTATEPQYQPGENL

SEQ ID NO: 319 - protein, 1480 aa, Homo sapiens
MQRSPLEKASVVSKLFFSWTRPILRKGYRQRLELSDIYQIPSVDSADNLSEKLEREWDRELASKKNPKLINALRRCFFWRFMFYGIFLYLGEVTKAVQPLLLGRIIASYDPDNKEERSIAIYLGIGLCLLFIVRTLLLHPAIFGLHHIGMQMRIAMFSLIYKKTLKLSSRVLDKISIGQLVSLLSNNLNKFDEGLALAHFVWIAPLQVALLMGLIWELLQASAFCGLGFLIVLALFQAGLGRMMMKYRDQRAGKISERLVITSEMIENIQSVKAYCWEEAMEKMIENLRQTELKLTRKAAYVRYFNSSAFFFSGFFVVFLSVLPYALIKGIILRKIFTTISFCIVLRMAVTRQFPWAVQTWYDSLGAINKIQDFLQKQEYKTLEYNLTTTEVVMENVTAFWEEGFGELFEKAKQNNNNRKTSNGDDSLFFSNFSLLGTPVLKDINFKIERGQLLAVAGSTGAGKTSLLMMIMGELEPSEGKIKHSGRISFCSQFSWIMPGTIKENIIFGVSYDEYRYRSVIKACQLEEDISKFAEKDNIVLGEGGITLSGGQRARISLARAVYKDADLYLLDSPFGYLDVLTEKEIFESCVCKLMANKTRILVTSKMEHLKKADKILILNEGSSYFYGTFSELQNLQPDFSSKLMGCDSFDQFSAERRNSILTETLHRFSLEGDAPVSWTETKKQSFKQTGEFGEKRKNSILNPINSIRKFSIVQKTPLQMNGIEEDSDEPLERRLSLVPDSEQGEAILPRISVISTGPTLQARRRQSVLNLMTHSVNQGQNIHRKTTASTRKVSLAPQANLTELDIYSRRLSQETGLEISEEINEEDLKECLFDDMESIPAVTTWNTYLRYITVHKSLIFVLIWCLVIFLAEVAASLVVLWLLGNTPLQDKGNSTHSRNNSYAVIITSTSSYYVFYIYVGVADTLLAMGFFRGLPLVHTLITVSKILHHKMLHSVLQAPMSTLNTLKAGGILNRFSKDIAILDDLLPLTIFDFIQLLLIVIGAIAVVAVLQPYIFVATVPVIVAFIMLRAYFLQTSQQLKQLESEGRSPIFTHLVTSLKGLWTLRAFGRQPYFETLFHKALNLHTANWFLYLSTLRWFQMRIEMIFVIFFIAVTFISILTTGEGEGRVGIILTLAMNIMSTLQWAVNSSIDVDSLMRSVSRVFKFIDMPTEGKPTKSTKPYKNGQLSKVMIIENSHVKKDDIWPSGGQMTVKDLTAKYTEGGNAILENISFSISPGQRVGLLGRTGSGKSTLLSAFLRLLNTEGEIQIDGVSWDSITLQQWRKAFGVIPQKVFIFSGTFRKNLDPYEQWSDQEIWKVADEVGLRSVIEQFPGKLDFVLVDGGCVLSHGHKQLMCLARSVLSKAKILLLDEPSAHLDPVTYQIIRRTLKQAFADCTVILCEHRIEAMLECQQFLVIEENKVRQYDSIQKLLNERSLFRQAISPSDRVKLFPHRNSSKCKSKPQIAALKEETEEEVQDTRL

SEQ ID NO: 320 - protein, 522 aa, Homo sapiens
GFLPATKNLLNEKNHGVLHTSVVLLTEMCERSPDMLAHFRENEKLVPQLVRILKNLIMSGYSPGHDVSGISDPFLQVRILRLLRILGRNDDDSSEAMNDILAQVATNTETSKNVGNAILYETVLTIMDIKSESGLRVLAINILGRFLLNNDKNIRYVALTSLLKTVQTDHNAVQRHRSTIVDCLKDLDVSIKRRAMELSFALVNGNNIRGMMKELLYFLDSCEPEFKADCASGIFLAAEKYAPSKRWHIDTIMRVLTTAGSYVRDDAVPNLIQLITNSVEMHAYTVQRLYKAILGDYSQQPLVQVAAWCIGEYGDLLVSGQCEEEEPIQVTEDEVLDILESVLISNMSTSVTRGYALTAIMKLSTRFTCTVNRIKKVVSIYGSSIDVELQRRAVEYNALFKKYDHMRSALLERMPVMEKVTTNGPTEIVQTNGETEPAPLETKPPPSGPQPTSQANDLLDLLGGNDITPVIPTAPTSKPSSAGGELLDLLGDINLTGSHSVSQAGVQWDYLGSLQPLPPAFR

SEQ ID NO: 321 - protein, 590 aa, Homo sapiens
TRAAARGSDQGSATRAERAPRTPEASGRGSPVPTSGPGPARPGPAPRGLGAEDGRRRGRPIGIPFPDHSSDILSGLNEQRTQGLLCDVVILVEGREFPTHRSVLAACSQYFKKLFTSGAVVDQQNVYEIDFVSAEALTALMDFAYTATLTVSTANVGDILSAARLLEIPAVSHVCADLLDRQILAADAGADAGQLDLVDQIDQRNLLRAKEYLEFFQSNPMNSLPPAAAAAAASFPWSAFGASDDDLDATKEAVAAAVAAVAAGDCNGLDFYGPGPPAERPPTGDGDEGDSNPGLWPERDEDAPTGGLFPPPVAPPAATQNGHYGRGGEEEAASLSEAAPEPGDSPGFLSGAAEGEDGDGPDVDGLAASTLLQQMDVIGGPGGGRGGGQRRGVAGRRQGRHGLLPEVLQRRPRRRRLPGLVAEGGEEDPSQGLPEVPHLREGHPGRRQAAATHPHPHGREALRVQHLQGPLHQAGQAEGAHAEAHGREAVPVPAVRRRLCPQLRPEEPHARAHGPAPLPVRQLLQDLRPLRPPAQTPQERRLQRRPLAPRPQAPRPGRGARPQPGGHRDPRRPRPAQLPRRPAQRPGEAL

SEQ ID NO: 322 - protein, 500 aa, Homo sapiens
MGIGLSAQGVNMNRLPGWDKHSYGYHGDDGHSFCSSGTGQPYGPTFTTGDVIGCCVNLINNTCFYTKNGHSLGIAFTDLPPNLYPTVGLQTPGEVVDANFGQHPFVFDIEDYMREWRTKIQAQIDRFPIGDREGEWQTMIQKMVSSYLVHHGYCATAEAFARSTDQTVLEELASIKNRQRIQKLVLAGRMGEAIETTQQLYPSLLERNPNLLFTLKVRQFIEMVNGTDSEVRCLGGRSPKSQDSYPVSPRPFSSPSMSPSHGMNIHNLASGKGSTAHFSGFESCSNGVISNKAHQSYCHSNKHQSSNLNVPELNSINMSRSQQVNNFTSNDVDMETDHYSNGVGETSSNGFLNGSSKHDHEMEDCDTEMEVDSSQLRRQLCGGSQAAIERMIHFGRELQAMSEQLRRDCGKNTANKKMLKDAFSLLAYSDPWNSPVGNQLDPIQREPVCSALNSAILETHNLPKQPPLALAMGQATQCLGLMARSGIGSCAFATVEDYLH

SEQ ID NO: 323 - protein, 330 aa, Homo sapiens
MEAVAKFDFTASGEDELSFHTGDVLKILSNQEEWFKAELGSQEGYVPKNFIDIQFPKWFHEGLSRHQAENLLMGKEVGFFIIRASQSSPGDFSISVRHEDDVQHFKVMRDNKGNYFLWTEKFPSLNKLVDYYRTNSISRQKQIFLRDRTREDQGHRGNSLDRRSQGGPHLSGAVGEEIRPSMNRKLSDHPPTLPLQQHQHQPQPPQYAPAPQQLQQPPQQRYLQHHHFHQERRGGSLDINDGHCGTGLGSEMNAALMHRRHTDPVQLQAAGRVRWARALYDFEALEDDELGFHSGEVVEVLDSSNPSWWTGRLHNKLGLFPANYVAPMTR

SEQ ID NO: 324 - protein, 189 aa, Homo sapiens; identical to SEQ ID NO: 236

SEQ ID NO: 325 - protein, 1044 aa, Homo sapiens
MPPGVDCPMEFWTKEENQSVVVDFLLPTGVYLNFPVSRNANLSTIKQLLWHRAQYEPLFHMLSGPEAYVFTCINQTAEQQELEDEQRRLCDVQPFLPVLRLVAREGDRVKKLINSQISLLIGKGLHEFDSLCDPEVNDFRAKMCQFCEEAAARRQQLGWEAWLQYSFPLQLEPSAQTWGPGTLRLPNRALLVNVKFEGSEESFTFQVSTKDVPLALMACALRKKATVFRQPLVEQPEDYTLQVNGRHEYLYGSYPLCQFQYICSCLHSGLTPHLTMVHSSSILAMRDEQSNPAPQVQKPRAKPPPIPAKKPSSVSLWSLEQPFRIELIQGSKVNADERMKLVVQAGLFHGNEMLCKTVSSSEVSVCSEPVWKQRLEFDINICDLPRMARLCFALYAVIEKAKKARSTKKKSKKADCPIAWANLMLFDYKDQLKTGERCLYMWPSVPDEKGELLNPTGTVRSNPNTDSAAALLICLPEVAPHPVYYPALEKILELGRHSECVHVTEEEQLQLREILERRGSGELYEHEKDLVWKLRHEVQEHFPEALARLLLVTKWNKHEDVAQMLYLLCSWPELPVLSALELLDFSFPDCHVGSFAIKSLRKLTDDELFQYLLQLVQVLKYESYLDCELTKFLLDRALANRKIGHFLFWHLRSEMHVPSVALRFGLILEAYCRGRTHHMKVLMKQGEALSKLKALNDFVKLSSQKTPKPQTKELMHLCMRQEAYLEALSHLQSPLDPSTLLAEVCVEQCTFMDSKMKPLWIMYSNEEAGSGGSVGIIFKNGDDLRQDMLTLQMIQLMDVLWKQEGLDLRMTPYGCLPTGDRTGLIEVVLRSDTIANIQLNKSNMAATAAFNKDALLNWLKSKNPGEALDRAIEEFTLSCAGYCVATYVLGIGDRHSDNIMIRESGQLFHIDFGHFLGNFKTKFGINRERVPFILTYDFVHVIQQGKTNNSEKFERFRGYCERAYTILRRHGLLFLHLFALMRAAGLPELSCSKDIQYLKDSLALGKTEEEALKHFRVKFNEALRESWKTKVNWLAHNVSKDNRQ

SEQ ID NO: 326 - protein, 640 aa, Homo sapiens [sequence omitted]

SEQ ID NO: 327 - protein, 847 aa, Homo sapiens
MEPLKSLFLKSPLGSWNGSGSGGGGGGGGGRPEGSPKAAGYANPVWTALFDYEPSGQDELALRKGDRVEVLSRDAAISGDEGWWAGQVGGQVGIFPSNYVSRGGGPPPCEVASFQELRLEEVIGIGGFGKVYRGSWRGELVAVKAARQDPDEDISVTAESVRQEARLFAMLAHPNIIALKAVCLEEPNLCLVMEYAAGGPLSRALAGRRVPPHVLVNWAVQIARGMHYLHCEALVPVIHRDLKSNNILLLQPIESDDMEHKTLKITDFGLAREWHKTTQMSAAGTYAWMAPEVIKASTFSKGSDVWSFGVLLWELLTGEVPYRGIDCLAVAYGVAVNKLTLPIPSTCPEPFAQLMADCWAQDPHRRPDFASILQQLEALEAQVLREMPRDSFHSMQEGWKREIQGLFDELRAKEKELLSREEELTRAAREQRSQAEQLRRREHLLAQWELEVFERELTLLLQQVDRERPHVRRRRGTFKRSKLRARDGGERISMPLDFKHRITVQASPGLDRRRNVFEVGPGDSPTFPRFRAIQLEPAEPGQAWGRQSPRRLEDSSNGERRACWAWGPSSPKPGEAQNGRRRSRMDEATWYLDSDDSSPLGSPSTPPALNGNPPRPSLEPEEPKRPVPAERGSSSGTPKLIQRALLRGTALLASLGLGRDLQPPGGPGRERGESPTTPPTPTPAPCPTEPPPSPLICFSLKTPDSPPTPAPLLLDLGIPVGQRSAKSPRREEEPRGGTVSPPPGTSRSAPGTPGTPRSPPLGLISRPRPSPLRSRIDPWSFVSAGPRPSPLPSPQPAPRRAPWTLFPDSDPFWDSPPANPFQGGPQDCRAQTKDMGAQAPWVPEAGP

SEQ ID NO: 328 - protein, 209 aa, Homo sapiens
MVDYLANKPKGQNSLALHKVIMVGSGGVGKSALTLQFMYDEFVEDYEPTKADSYRKKVVLDGEEVQIDILDTAGQEDYAAIRDNYFRSGEGFLCVFSITEMESFAATADFREQILRVKEDENVPFLLVGNKSDLEDKRQVSVEEAKNRAEQWNVNYVETSAKTRANVDKVFFDLMREIRARKMEDSKEKNGKKKRKSLAKRIRERCCIL

SEQ ID NO: 329 - protein, 397 aa, Homo sapiens
MNAGSDPVVIVSAARTIIGSFNGALAAVPVQDLGSTVIKEVLKRATVAPEDVSEVIFGHVLAAGCGQNPVRQASVGAGIPYSVPAWSCQMICGSGLKAVCLAVQSIGIGDSSIVVAGGMENMSKAPHLAYLRTGVKIGEMPLTDSILCDGLTDAFHNCHMGITAENVATKWQVSREDQDKVAVLSQNRTENAQKAGHFDKEIVPVLVSTRKGLIEVKTDEFPRHGSNIEAMSKLKPYFLTDGTGTVTPANASGINDGAAAVALMKKSEADKRGLTPLARIVSWSQVGVEPSIMGIGPIPAIKQAVTKAGWSLEDVDIFEINEAFAAVSAAIVKELGLNPEKVNIEGGAIALGHPLGASGCRILVTLLHTLERMGRSRGVAALCIGGGMGIAMCVQRE

SEQ ID NO: 330 - protein, 814 aa, Homo sapiens
MDAAFLLVLGLLAQSLCLSLGVPGWRRPTTLYPWRRAPALSRVRRAWVIPPISVSENHKRLPYPLVQIKSDKQQLGSVIYSIQGPGVDEEPRGVFSIDKFTGKVFLNAMLDREKTDRFRLRAFALDLGGSTLEDPTDLEIVVVDQNDNRPAFLQEAFTGRVLEGAVPGTYVTRAEATDADDPETDNAALRFSILQQGSPELFSIDELTGEIRTVQVGLDREVVAVYNLTLQVADMSGDGLTATASAIITLDDINDNAPEFTRDEFFMEAIEAVSGVDVGRLEVEDRDLPGSPNWVARFTILEGDPDGQFTIRTDPKTNEGVLSIVKALDYESCEHYELKVSVQNEAPLQAAALRAERGQAKVRVHVQDTNEPPVFQENPLRTSLAEGAPPGTLVATFSARDPDTEQLQRLSYSKDYDPEDWLQVDAATGRIQTQHVLSPASPFLKGGWYRAIVLAQDDASQPRTATGTLSIEILEVNDHAPVLAPPPPGSLCSEPHQGPGLLLGATDEDLPPHGAPFHFQLSPRLPELGRNWSLSQVNVSHARLRPRHQVPEGLHRLSLLLRDSGQPPQQREQPLNVTVCRCGKDGVCLPGAAALLAGGTGLSLGALVIVLASALLLLVLVLLVALRARFWKQSRGKGLLHGPQDDLRDNVLNYDEQGGGEEDQDAYDISQLRHPTALSLPLGPPPLRRDAPQGRLHPQPPRVLPTSPLDIADFINDGLEAADSDPSVPPYDTALIYDYEGDGSVAGTLSSILSSQGDEDQDYDYLRDWGPRFARLADMYGHPCGLEYGARWDHQAREGLSPGALLPRHRGRTA

SEQ ID NO: 331 - protein, 1464 aa, Homo sapiens
MFSFVDLRLLLLLAATALLTHGQEEGQVEGQDEDIPPITCVQNGLRYHDRDVWKPEPCRICVCDNGKVLCDDVICDETKNCPGAEVPEGECCPVCPDGSESPTDQETTGVEGPKGDTGPRGPRGPAGPPGRDGIPGQPGLPGPPGPPGPPGPPGLGGNFAPQLSYGYDEKSTGGISVPGPMGPSGPRGLPGPPGAPGPQGFQGPPGEPGEPGASGPMGPRGPPGPPGKNGDDGEAGKPGRPGERGPPGPQGARGLPGTAGLPGMKGHRGFSGLDGAKGDAGPAGPKGEPGSPGENGAPGQMGPRGLPGERGRPGAPGPAGARGNDGATGAAGPPGPTGPAGPPGFPGAVGAKGEAGPQGPRGSEGPQGVRGEPGPPGPAGAAGPAGNPGADGQPGAKGANGAPGIAGAPGFPGARGPSGPQGPGGPPGPKGNSGEPGAPGSKGDTGAKGEPGPVGVQGPPGPAGEEGKRGARGEPGPTGLPGPPGERGGPGSRGFPGADGVAGPKGPAGERGSPGPAGPKGSPGEAGRPGEAGLPGAKGLTGSPGSPGPDGKTGPPGPAGQDGRPGPPGPPGARGQAGVMGFPGPKGAAGEPGKAGERGVPGPPGAVGPAGKDGEAGAQGPPGPAGPAGERGEQGPAGSPGFQGLPGPAGPPGEAGKPGEQGVPGDLGAPGPSGARGERGFPGERGVQGPPGPAGPRGANGAPGNDGAKGDAGAPGAPGSQGAPGLQGMPGERGAAGLPGPKGDRGDAGPKGADGSPGKDGVRGLTGPIGPPGPAGAPGDKGESGPSGPAGPTGARGAPGDRGEPGPPGPAGFAGPPGADGQPGAKGEPGDAGAKGDAGPPGPAGPAGPPGPIGNVGAPGAKGARGSAGPPGATGFPGAAGRVGPPGPSGNAGPPGPPGPAGKEGGKGPRGETGPAGRPGEVGPPGPPGPAGEKGSPGADGPAGAPGTPGPQGIAGQRGVVGLPGQRGERGFPGLPGPSGEPGKQGPSGASGERGPPGPMGPPGLAGPPGESGREGAPAAEGSPGRDGSPGAKGDRGETGPAGPPGAPGAPGAPGPVGPAGKSGDRGETGPAGPAGPVGPVGARGPAGPQGPRGDKGETGEQGDRGIKGHRGFSGLQGPPGPPGSPGEQGPSGASGPAGPRGPPGSAGAPGKDGLNGLPGPIGPPGPRGRTGDAGPVGPPGPPGPPGPPGPPSAGFDFSFLPQPPQEKAHDGGRYYRADDANVVRDRDLEVDTTLKSLSQQIENIRSPEGSRKNPARTCRDLKMCHSDWKSGEYWIDPNQGCNLDAIKVFCNMETGETCVYPTQPSVAQKNWYISKNPKDKRHVWFGESMTDGFQFEYGGQGSDPADVAIQLTFLRLMSTEASQNITYHCKNSVAYMDQQTGNLKKALLLKGSNEIEIRAEGNSRFTYSVTVDGCTSHTGAWGKTVIEYKTTKSSRLPIIDVAPLDVGAPDQEFGFDVGPVCFL

SEQ ID NO: 332 - protein, 322 aa, Homo sapiens
MADRDSGSEQGGAALGSGGSLGHPGSGSGSGGGGGGGGGGGGSGGGGGGAPGGLQHETQELASKRVDIQNKRFYLDVKQNAKGRFLKIAEVGAGGNKSRLTLSMSVAVEFRDYLGDFIEHYAQLGPSQPPDLAQAQDEPRRALKSEFLVRENRKYYMDLKENQRGRFLRIRQTVNRGPGLGSTQGQTIALPAQGLIEFRDALAKLIDDYGVEEEPAELPEGTSLTVDNKRFFFDVGSNKYGVFMRVSEVKPTYRNSITVPYKVWAKFGHTFCKYSEEMKKIQEKQREKRAACEQLHQQQQQQQEETAAATLLLQGEEEGEED

SEQ ID NO: 333 - protein, 328 aa, Homo sapiens
MGFWILAILTILMYSTAAKFSKQSWGLENEALIVRCPRQGKPSYTVDWYYSQTNKSIPTQERNRVFASGQLLKFLPAEVADSGIYTCIVRSPTFNRTGYANVTIYKKQSDCNVPDYLMYSTVSGSEKNSKIYCPTIDLYNWTAPLEWFKNCQALQGSRYRAHKSFLVIDNVMTEDAGDYTCKFIHNENGANYSVTATRSFTVKDEQGFSLFPVIGAPAQNEIKEVEIGKNANLTCSACFGKGTQFLAAVLWQLNGTKITDFGEPRIQQEEGQNQSFSNGLACLDMVLRIADVKEEDLLLQYDCLALNLHGLRRHTVRLSRKNPSKECF

SEQ ID NO: 334 - protein, 95 aa, Homo sapiens
VTVRTVDNLLEVSARHPQRLDRHGFVSREFCRTYVLPADVDPWRVRAALSHDGILNLEAPRGGRHLDTEVNEVYISLLPAPPDPEEEEEAAIVEP

SEQ ID NO: 335 - protein, 520 aa, Homo sapiens
MPGSLPLNAEACWPKDVGIVALEIYFPSQYVDQAELEKYDGVDAGKYTIGLGQAKMGFCTDREDINSLCMTVVQNLMERNNLSYDCIGRLEVGTETIIDKSKSVKTNLMQLFEESGNTDIEGIDTTNACYGGTAAVFNAVNWIESSSWDGRYALVVAGDIAVYATGNARPTGGVGAVALLIGPNAPLIFERGLRGTHMQHAYDFYKPDMLSEYPIVDGKLSIQCYLSALDRCYSVYCKKIHAQWQKEANDNDFTLNDFGFMIFHSPYCKLVQKSLARMLLNDFLNDQNRDKNSIYSGLKAFGDVKLEDTYFDRDVEKAFMKASSELFSQKTKASLLVSNQNGNMYTSSVYGSLASVLAQYSPQHLAGKRIGVFSYGSGLAATLYSLKVTQDATPGSALDKITASLCDLKSRLDSRTGVAQDVFAENMKLREDTHHLVNYIPQGSIDSLFEGTWYLVRVDEKHRRTYARRPTPNDDTLDEGVGLVHSNIATEHIPSPAKKVPRLPATAAEPEAAVISNGVW

SEQ ID NO: 336 - protein, 191 aa, Homo sapiens
MVKKLVMAQKRGETRALCLGVTMVVCAVITYYILVTTVLPLYQKSVWTQESKCHLIETNIRDQEELKGKKVPQYPCLWVNVSAAGRWAVLYHTEDTRDQNQQCSYIPGSVDNYQTARADVEKVRAKFQEQQVFYCFSAPRGNETSVLFQRLYGPQALLFSLFWPTFLLTGGLLIIAMVKSNQYLSILAAQK

SEQ ID NO: 337 - protein, 497 aa, Homo sapiens
MRSRRGPARPAAPRPRWSLGPRCAEAMFPVFPCTLLAPPFPVLGLDSRGVGGLMNSFPPPQGHAQNPLQVGAELQSRFFASQGCAQSPFQAAPAPPPTPQAPAAEPLQVDLLPVLAAAQESAAAAAAAAAAAAAVAAAPPAPAAASTVDTAALKQPPAPPPPPPPVSAPAAEAAPPASAATIAAAAATAVVAPTSTVAVAPVASALEKKTKSKGPYICALCAKEFKNGYNLRRHEAIHTGAKAGRVPSGAMKMPTMVPLSLLSVPQLSGAGGGGGEAGAGGGAAVAAGGVVTTTASGKRIRKNHACEMCGKAFRDVYHLNRHKLSHSDEKPYQCPVCQQRFKRKDRMSYHVRSHDGAVHKPYNCSHCGKSFSRPDHLNSHVRQVHSTERPFKCEKCEAAFATKDRLRAHTVRHEEKVPCHVCGKMLSSAYISDHMKVHSQGPHHVCELCNKGTGEVCPMAAAAAAAAAVAAPPTAVGSLSGAEGVPVSSQPLPSQPW

SEQ ID NO: 338 - protein, 633 aa, Homo sapiens
MPEIRLRHVVSCSSQDSTHCAENLLKADTYRKWRAAKAGEKTISVVLQLEKEEQIHSVDIGNDGSAFVEVLVGSSAGGAGEQDYEVLLVTSSFMSPSESRSGSNPNRVRMFGPDKLVRAAAEKRWDRVKIVCSQPYSKDSPFGLSFVRFHSPPDKDEAEAPSQKVTVTKLGQFRVKEEDESANSLRPGALFFSRINKTSPVTASDPAGPSYAAATLQASSAASSASPVSRAIGSTSKPQESPKGKRKLDLNQEEKKTPSKPPAQLSPSVPKRPKLPAPTRTPATAPVPARAQGAVTGKPRGEGTEPRRPRAGPEELGKILQGVVVVLSGFQNPFRSELRDKALELGAKYRPDWTRDSTHLICAFANTPKYSQVLGLGGRIVRKEWVLDCHRMRRRLPSRRYLMAGPGSSSEEDEASHSGGSGDEAPKLPQKQPQTKTKPTQAAGPSSPQKPPTPEETKAASPVLQEDIDIEGVQSEGQDNGAEDSGDTEDELRRVAEQKEHRLPPGQEENGEDPYAGSTDENTDSEEHQEPPDLPVPELPDFFQGKHFFLYGEFPGDERRKLIRYVTAFNGELEDYMSDRVQFVITAQEWDPSFEEALMDNPSLAFVRPRWIYSCNEKQKLLPHQLYGVVPQA

SEQ ID NO: 339 - protein, 880 aa, Homo sapiens [sequence omitted]

SEQ ID NO: 340 - protein, 685 aa, Homo sapiens
MQIFVKTLTGKTITLEVEPSDTIENVKAKIQDKEGIPPDQQRLIFAGKQLEDGRTLSDYNIQKESTLHLVLRLRGGMQIFVKTLTGKTITLEVEPSDTIENVKAKIQDKEGIPPDQQRLIFAGKQLEDGRTLSDYNIQKESTLHLVLRLRGGMQIFVKTLTGKTITLEVEPSDTIENVKAKIQDKEGIPPDQQRLIFAGKQLEDGRTLSDYNIQKESTLHLVLRLRGGMQIFVKTLTGKTITLEVEPSDTIENVKAKIQDKEGIPPDQQRLIFAGKQLEDGRTLSDYNIQKESTLHLVLRLRGGMQIFVKTLTGKTITLEVEPSDTIENVKAKIQDKEGIPPDQQRLIFAGKQLEDGRTLSDYNIQKESTLHLVLRLRGGMQIFVKTLTGKTITLEVEPSDTIENVKAKIQDKEGIPPDQQRLIFAGKQLEDGRTLSDYNIQKESTLHLVLRLRGGMQIFVKTLTGKTITLEVEPSDTIENVKAKIQDKEGIPPDQQRLIFAGKQLEDGRTLSDYNIQKESTLHLVLRLRGGMQIFVKTLTGKTITLEVEPSDTIENVKAKIQDKEGIPPDQQRLIFAGKQLEDGRTLSDYNIQKESTLHLVLRLRGGMQIFVKTLTGKTITLEVEPSDTIENVKAKIQDKEGIPPDQQRLIFAGKQLEDGRTLSDYNIQKESTLHLVLRLRGGV

SEQ ID NO: 341 - protein, 350 aa, Homo sapiens [sequence omitted]

SEQ ID NO: 342 - protein, 341 aa, Homo sapiens
MAALYACTKCHQRFPFEALSQGQQLCKECRIAHPVVKCTYCRTEYQQERLECNGTISAHCNLHLPGSSDSPASSSRVAGITGIKTNTICKKCAQNVQLYGTPKPCQYCNIIAAFIGNKCQRCTNSEKKYGPPYSCEQCKQQCAFDRKDDRKKVDGKLLCWLCTLSYKRVLQKTKEQRKHLSSSSRAGHQEKEQYSRLSGGGHYNSQKTLSTSSIQNEIPKKKSKFESITTNGDSFSPDLALDSPGTDHFVIIAQLKEEVATLKKMLHQKDQMILEKEKKITELKADFQYQESQMRAKMNQMEKTHKEVTEQLQAKNRELLKQAAALSKSKKSEKSGAITSP

SEQ ID NO: 343 - protein, 941 aa, Homo sapiens
MGQACGHSILCRSQQYPAARPAEPRGQQVFLKPDEPPPPPQPCADSLQDALLSLGSVIDISGLQRAVKEALSAVLPRVETVYTYLLDGESQLVCEDPPHELPQEGKVREAIISQKRLGCNGLGFSDLPGKPLARLVAPLAPDTQVLVMPLADKEAGAVAAVILVHCGQLSDNEEWSLQAVEKHTLVALRRVQVLQQRGPREAPRAVQNPPEGTAEDQKGGAAYTDRDRKILQLCGELYDLDASSLQLKVLQYLQQETRASRCCLLLVSEDNLQLSCKVIGDKVLGEEVSFPLTGCLGQVVEDKKSIQLKDLTSEDVQQLQSMLGCELQAMLCVPVISRATDQVVALACAFNKLEGDLFTDEDEHVIQHCFHYTSTVLTSTLAFQKEQKLKCECQALLQVAKNLFTHLDDVSVLLQEIITEARNLSNAEICSVFLLDQNELVAKVFDGGVVDDESYEIRIPADQGIAGHVATTGQILNIPDAYAHPLFYRGVDDSTGFRTRNILCFPIKNENQEVIGVAELVNKINGPWFSKFDEDLATAFSIYCGISIAHSLLYKKVNEAQYRSHLANEMMMYHMKVSDDEYTKLLHDGIQPVAAIDSNFASFTYTPRSLPEDDTSMAILSMLQDMNFINNYKIDCPTLARFCLMVKKGYRDPPYHNWMHAFSVSHFCYLLYKNLELTNYLEDIEIFALFISCMCHDLDHRGTNNSFQVASKSVLAALYSSEGSVMERHHFAQAIAILNTHGCNIFDHFSRKDYQRMLDLMRDIILATDLAHHLRIFKDLQKMAEVGYDRNNKQHHRLLLCLLMTSCDLSDQTKGWKTTRKIAELIYKEFFSQGDLEKAMGNRPMEMMDREKAYIPELQISFMEHIAMPIYKLLQDLFPKAAELYERVASNREHWTKVSHKFTIRGLPSNNSLDFLDEEYEVPDLDGTRAPINGCCSLDAE

SEQ ID NO: 344 - protein, 516 aa, Homo sapiens
MEANWTAFLFQAHEASHHQQQAAQNSLLPLLSSAVEPPDQKPLLPIPITQKPQGAPETLKDAIGIKKEKPKTSFVCTYCSKAFRDSYHLRRHESCHTGIKLVSRPKKTPTTVVPLISTIAGDSSRTSLVSTIAGILSTVTTSSSGTNPSSSASTTAMPVTQSVKKPSKPVKKNHACEMCGKAFRDVYHLNRHKLSHSDEKPFECPICNQRFKRKDRMTYHVRSHEGGITKPYTCSVCGKGFSRPDHLSCHVKHVHSTERPFKCQTCTAAFATKDRLRTHMVRHEGKVSCNICGKLLSAAYITSHLKTHGQSQSINCNTCKQGISKTCMSEETSNQKQQQQQQQQQQQQQHVTSWPGKQVETLRLWEEAVKARKKEAANLCQTSTAATTPVTLTTPFSITSSVSSETMSNPVTVAAAMSMRSPVNVSSAVNITSPMNIGHPVTITSPLSMTSPLTLTTPVNLPTPVTAPVNIAHPVTITSPMNLPTPMTLAAPLNIAMRPVESMPFLPQALPTSPPW

SEQ ID NO: 345 - protein, 837 aa, Homo sapiens
MASKRKSTTPCMVRTSQVVEQDVPEEVDRAKEKGIGTPQPDVAKDSWAAELENSSKENEVIEVKSMGESQSKKLQGGYECKYCPYSTQNLNEFTEHVDMQHPNVILNPLYVCAECNFTTKKYDSLSDHNSKFHPGEANFKLKLIKRNNQTVLEQSIETTNHVVSITTSGPGTGDSDSGISVSKTPIMKPGKPKADAKKVPKKPEEITPENHVEGTARLVTDTAEILSRLGGVELLQDTLGHVMPSVQLPPNINLVPKVPVPLNTTKYNSALDTNATMINSFNKFPYPTQAELSWLTAASKHPEEHIRIWFATQRLKHGISWSPEEVEEARKKMFNGTIQSVPPTITVLPAQLAPTKVTQPILQTALPCQILGQTSLVLTQVTSGSTTVSCSPITLAVAGVTNHGQKRPLVTPQAAPEPKRPHIAQVPEPPPKVANPPLTPASDRKKTKEQIAHLKASFLQSQFPDDAEVYRLIEVTGLARSEIKKWFSDHRYRCQRGIVHITSESLAKDQLAIAASRHGRTYHAYPDFAPQKFKEKTQGQVKILEDSFLKSSFPTQAELDRLRVETKLSRREIDSWFSERRKLRDSMEQAVLDSMGSGKKGQDVGAPNGALSRLDQLSGAQLTSSLPSPSPAIAKSQEQVHLLRSTFARTQWPTPQEYDQLAAKTGLVRTEIVRWFKENRCLLKTGTVKWMEQYQHQPMADDHGYDAVARKATKPMAESPKNGGDVVPQYYKDPKKLCEEDLEKLVTRVKVGSEPAKDCLPAKPSEATSDRSEGSSRDGQGSDENEESSVVDYVEVTVGEEDAISDRSDSWSQAAAEGVSELAESDSDCVPAEAGQA

SEQ ID NO: 346 - protein, 101 aa, Homo sapiens
MACPLEKALDVMVSTFHKYSGKEGDKFKLNKSELKELLTRELPSFLGKRTDEAAFQKLMSNLDSNRDNEVDFQEYCVFLSCIAMMCNEFFEGFPDKQPRKK

SEQ ID NO: 347 - protein, 734 aa, Homo sapiens
MAASPGPAGVGGAGAVYGSGSSGFALDSGLEIKTRSVEQTLLPLVSQITTLINHKDNTKKSDKTLQAIQRVGQAVNLAVGRFVKVGEAIANENWDLKEEINIACIEAKQAGETIAALTDITNLNHLESDGQITIFTDKTGVIKAARLLLSSVTKVLLLADRVVIKQIITSRNKVLATMERLEKVNSFQEFVQIFSQFGNEMVEFAHLSGDRQNDLKDEKKKAKMAAARAVLEKCTMMLLTASKTCLRHPNCESAHKNKEGVFDRMKVALDKVIEIVTDCKPNGETDISSISIFTGIKEFKMNIEALRENLYFQSKENLSVTLEVILERMEDFTDSAYTSHEHRERILELSTQARMELQQLISVWIQAQSKKTKSIAEELELSILKISHSLNELKKELHSTATQLAADLLKYHADHVVLKALKLTGVEGNLEALAEYACKLSEQKEQLVETCRLLRHISGTEPLEITCIHAEETFQVTGQQIISAAETLTLHPSSKIAKENLDVFCEAWESQISDMSTLLREINDVFEGRRGEKYGYLSLPKPMKNNANLKSLKPDKPDSEEQAKIAKLGLKLGLLTSDADCEIEKWEDQENEIVQYGRNMSSMAYSLYLFTRGEGPLKTSQDLIHQLEVFAAEGLKLTSSVQAFSKQLKDDDKLMLLLEINKLIPLCHQLQTVTKTSLQNKVFLKVDKCITKTRSMMALLVQLLSLCYKLLKKLQMENNGWVSVTNKDTMDSKT

SEQ ID NO: 348 - protein, 255 aa, Homo sapiens
MALNVAPVRDTKWLTLEVCRQFQRGTCSRSDEECKFAHPPKSCQVENGRVIACFDSLKGRCSRENCKYLHPPTHLKTQLEINGRNNLIQQKTAAAMLAQQMQFMFPGTPLHPVPTFPVGPAIGTNTAISFAPYLAPVTPGVGLVPTEILPTTPVIVPGSPPVTVPGSTATQKLLRTDKLEVCREFQRGNCARGETDCRFAHPADSTMIDTSDNTVTVCMDYIKGRCMREKCKYFHPPAHLQAKIKAAQPRPRPQS

SEQ ID NO: 349 - protein, 485 aa, Homo sapiens
MSTGFSFGSGTLGSTTVAAGGTSTGGVFSFGTGASSNPSVGLNFGNLGSTSTPATTSAPSSGFGTGLFGSKPATGFTLGGTNTGIATTITTGLTLGTPATTSAATTGFSLGFNKPAASATPFALPITSTSASGLTLSSALTSTPAASTGFTLNNLGGTTATTTTASTGLSLGGALAGLGGSLFQSTNTGTSGLGQNALGLTLGTTAATSTAGNEGLGGIDFSSSSDKKSDKTGTRPEDSKALKDENLPPVICQDVENLQKFVKEQKQVQEEISRMSSKAMLKVQEDIKALKQLLSLAANGIQRNTLNIDKLKIETAQELKNAEIALRTQKTPPGLQHEYAAPADYFRILVQQFEVQLQQYRQQIEELENHLATQANNSHITPQDLSMAMQKIYQTFVALAAQLQSIHENVKVLKEQYLGYRKMFLGDAVDVFETRRAEAKKWQNTPRVTTGPTPFSTMPNAAAVAMAATLTQQQQPATGLNAFKL

SEQ ID NO: 350 - protein, 1388 aa, Homo sapiens [sequence omitted]

SEQ ID NO: 351 - protein, 1385 aa, Homo sapiens
NRPRWNFQGKSFGVVLVHFSSEEVDMASDSPARSLDEIDLSALRDPAGIFELVELVGNGTYGQVYKGRHVKTGQLAAIKVMDVTGDEEEEIKQEINMLKKYSHHRNIATYYGAFIKKNPPGMDDQLWLVMEFCGAGSVTDLIKNTKGNTLKEEWIAYICREILRGLSHLHQHKVIHRDIKGQNVLLTENAEVKLVDFGVSAQLDRTVGRRNTFIGTPYWMAPEVIACDENPDATYDFKSDLWSLGITAIEMAEGAPPLCDMHPMRALFLIPRNPAPRLKSKKWSKKFQSFIESCLVKNHSQRPATEQLMKHPFIRDQPNERQVRIQLKDHIDRTKKKRGEKDETEYEYSGSEEEEEENDSGEPSSILNLPGESTLRRDFLRLQLANKERSEALRRQQLEQQQRENEEHKRQLLAERQKRIEEQKEQRRRLEEQQRREKELRKQQEREQRRHYEEQMRREEERRRAEHEQEYIRRQLEEEQRQLEILQQQLLHEQALLLEYKRKQLEEQRQAERLQRQLKQERDYLVSLQHQRQEQRPVEKKPLYHYKEGMSPSEKPAWAKEVEERSRLNRQSSPAMPHKVANRISDPNLPPRSESFSISGVQPARTPPMLRPVDPQIPHLVAVKSQGPALTASQSVHEQPTKGLSGFQEALNVTSHRVEMPRQNSDPTSENPPLPTRIEKFDRSSWLRQEEDIPPKVPQRTTSISPALARKNSPGNGSALGPRLGSQPIRASNPDLRRTEPILESPLQRTSSGSSSSSSTPSSQPSSQGGSQPGSQAGSSERTRVRANSKSEGSPVLPHEPAKVKPEESRDITRPSRPASYKKAIDEDLTALAKELRELRIEETNRPMKKVTDYSSSSEESESSEEEEEDGESETHDGTVAVSDIPRLIPTGAPGSNEQYNVGMVGTHGLETSHADSFSGSISREGTLMIRETSGEKKRSGHSDSNGFAGHINLPDLVQQSHSPAGTPTEGLGRVSTHSQEMDSGTEYGMGSSTKASFTPFVDPRVYQTSPTDEDEEDEESSAAALFTSELLRQEQAKLNEARKISVVNVNPTNIRPHSDTPEIRKYKKRFNSEILCAALWGVNLLVGTENGLMLLDRSGQGKVYNLINRRRFQQMDVLEGLNVLVTISGKKNKLRVYYLSWLRNRILHNDPEVEKKQGWITVGDLEGCIHYKVVKYERIKFLVIALKNAVEIYAWAPKPYHKFMAFKSFADLQHKPLLVDLTVEEGQRLKVIFGSHTGFHVIDVDSGNSYDIYIPSHIQGNITPHAIVILPKTDGMEMLVCYEDEGVYVNTYGRITKDVVLQWGEMPTSVAYIHSNQIMGWGEKAIEIRSVETGHLDGVFMHKRAQRLKFLCERNDKVFFASVRSGGSSQVFFMTLNRNSMMNW

SEQ ID NO: 352 - protein, 382 aa, Homo sapiens
MDGETAEEQGGPVPPPVAPGGPGLGGAPGGRREPKKYAVTDDYQLSKQVLGLGVNGKVLECFHRRTGQKCALKLLYDSPKARQEVDHHWQASGGPHIVCILDVYENMHHGKRCLLIIMECMEGGELFSRIQERGDQAFTEREAAEIMRDIGTAIQFLHSHNIAHRDVKPENLLYTSKEKDAVLKLTDFGFAKETTQNALQTPCYTPYYVAPEVLGPEKYDKSCDMWSLGVIMYILLCGFPPFYSNTGQAISPGMKRRIRLGQYGFPNPEWSEVSEDAKQLIRLLLKTDPTERLTITQFMNHPWINQSMVVPQTPLHTARVLQEDKDHWDEVKEEMTSALATMRVDYDQVKIKDLKTSNNRLLNKRRKKQAGSSSASQGCNNQ

SEQ ID NO: 353 - protein, 313 aa, Homo sapiens
EFRGLDQYIIKRFDGKKISQEREKFADEGSIFYTLGECGLISFSDYIFLTTVLSTPQRNFEIAFKMFDLNGDGEVDMEEFEQVQSIIRSQTSMGMRHRDRPTTGNTLKSGLCSALTTYFFGADLKGKLTIKNFLEFQRKLQHDVLKLEFERHDPVDGRITERQFGGMLLAYSGVQSKKLTAMQRQLKKHFKEGKGLTFQEVENFFTFLKNINDVDTALSFYHMAGASLDKVTMQQVARTVAKVELSDHVCDVVFALFDCDGNGELSNKEFVSIMKQRLMRGLEKPKDMGFTRLMQAMWKCAQETAWDFALPKQ

SEQ ID NO: 354 - protein, 340 aa, Homo sapiens
MVTLRKRTLKVLTFLVLFIFLTSFFLNYSHTMVATTWFPKQMVLELSENLKRLIKHRPCTCTHCIGQRKLSAWFDERFNQTMQPLLTAQNALLEDDTYRWWLRLQREKKPNNLNDTIKELFRVVPGNVDPMLEKRSVGCRRCAVVGNSGNLRESSYGPEIDSHDFVLRMNKAPTAGFEADVGTKTTHHLVYPESFRELGDNVSMILVPFKTIDLEWVVSAITTGTISHTYIPVPAKIRVKQDKILIYHPAFIKYVFDNWLQGHGRYPSTGILSVIFSMHVCDEVDLYGFGADSKGNWHHYWENNPSAGAFRKTGVHDADFESNVTATLASINKIRIFKGR

SEQ ID NO: 355 - protein, 163 aa, Homo sapiens
VTNKISRPYKMAATQTGTCLMVAALCFVLVLGSLVPCLPEFSSGSQTVKEDPLAADGVYTASQMPSRSLLFYDDGAGLWEDGRSTLLPMEPPDGWEINPGGPAEQRPRDHLQHDHLDSTHETTKYLSEAWPKDGGNGTSPDFSHSKEWFHDRDLGPNTTIKLS

SEQ ID NO: 356 - protein, 104 aa, Homo sapiens
PRAKFLPVYHPSPEESRDPTLYANNVQRVMAQALGIPATECEFVGSLPVIVVGRLKVALEPQLWGTGKSASEGWAVRWLCGRWGRARPESNDQPGRVCQAATAL

SEQ ID NO: 357 - protein, 950 aa, Homo sapiens
KPSRAANPPARPRSCPPCLAAGPSMVMADGPRHLQRGPVRVGFYDIEGTLGKGNFAVVKLGRHRITKTEVAIKIIDKSQLDAVNLEKIYREVQIMKMLDHPHIIKLYQVMETKSMLYLVTEYAKNGEIFDYLANHGRLNESEARRKFWQILSAVDYCHGRKIVHRDLKAENLLLDNNMNIKIADFGFGNFFKSGELLATWCGSPPYAAPEVFEGQQYEGPQLDIWSMGVVLYVLVCGALPFDGPTLPILRQRVLEGRFRIPYFMSEDCEHLIRRMLVLDPSKRLTIAQIKEHKWMLIEVPVQRPVLYPQEQENEPSIGEFNEQVLRLMHSLGIDQQKTIESLQNKSYNHFAAIYFLLVERLKSHRSSFPVEQRLDGRQRRPSTIAEQTVAKAQTVGLPVTMHSPNMRLLRSALLPQASNVEAFSFPASGCQAEAAFMEEECVDTPKVNGCLLDPVPPVLVRKGCQSLPSNMMETSIDEGLETEGEAEEDPAHAFEAFQSTRSGQRRHTLSEVTNQLVVMPGAGKIFSMNDSPSLDSVDSEYDMGSVQRDLNFLEDNPSLKDIMLANQPSPRMTSPFISLRPTNPAMQALSSQKREVHNRSPVSFREGRRASDTSLTQGIVAFRQHLQNLARTKGILELNKVQLLYEQIGPEADPNLAPAAPQLQDLASSCPQEEVSQQQESVSTLPASVHPQLSPRQSLETQYLQHRLQKPSLLSKAQNTCQLYCKEPPRSLEQQLQEHRLQQKRLFLQKQSQLQAYFNQMQIAESSYPQPSQQLPLPRQETPPPSQQAPPFSLTQPLSPVLEPSSEQMQYSPFLSQYQEMQLQPLPSTSGPRAAPPLPTQLQQQQPPPPPPPPPPRQPGAAPAPLQFSYQTCELPSAASPAPDYPTPCQYPVDGAQQSDLTGPDCPRSPGLQEAPSSYDPLALSELPGLFDCEMLDAVDPQHNGYVLVN

SEQ ID NO: 358 - protein, 653 aa, Homo sapiens
RGRGPEAAAQEEAEEVGRSGPGRRAAQRRSPGLAMLLASAVVVWEWLNEHGRWRPYSPAVSHHIEAVVRAGPRAGGSVVLGQVDSRLAPYIIDLQSMNQFRQDTGTLRPVRRNYYDPSSAPGKGVVWEWENDNGSWTPYDMEVGITIQHAYEKQHPWIDLTSIGFSYVIDFNTMGQINRQTQRQRRVRRRLDLIYPMVTGTLPKAQSWPVSPGPATSPPMSPCSCPQCVLVMSVKAAVVNGSTGPLQLPVTRKNMPPPGVVKLPPLPGSGAKPLDSTGTIRGPLKTAPSQVIRRQASSMPTGTTMGSPASPPGPNSKTGRVALATLNRTNLQRLAIAQSRVLIASGVPTVPVKNLNGSSPVNPALAGITGILMSAAGLPVCLTRPPKLVLHPPPVSKSEIKSIPGVSNTSRKTTKKQAKKGKTPEEVLKKYLQKVRHPPDEDCTICMERLTAPSGYKGPQPTVKPDLVGKLSRCGHVYHIYCLVAMYNNGNKDGSLQCPTCKTIYGVKTGTQPPGKMEYHLIPHSLPGHPDCKTIRIIYSIPPGIQGPEHPNPGKSFSARGFPRHCYLPDSEKGRKVLKLLLVAWDRRLIFAIGTSSTTGESDTVIWNEVHHKTEFGSNLTGHGYPDANYLDNVLAELAAQGISEDSTAQEKD

SEQ ID NO: 359 - protein, 492 aa, Homo sapiens
MSTTLLSAFYDVDFLCKTEKSLANLNLNNMLDKKAVGTPVAAAPSSGFAPGFLRRHSASNLHALAHPAPSPGSCSPKFPGAANGSSCGSAAAGGPTSYGTLKEPSGGGGTALLNKENKFRDRSFSENGDRSQHLLHLQQQQKGGGGSQINSTRYKTELCRPFEESGTCKYGEKCQFAHGFHELRSLTRHPKYKTELCRTFHTIGFCPYGPRCHFIHNADERRPAPSGGASGDLRAFGTRDALHLGFPREPRPKLHHSLSFSGFPSGHHQPPGGLESPLLLDSPTSRTPPPPSCSSASSCSSSASSCSSASAASTPSGTPTCCASAAAALRLLYGTGGAEDLLAPGAPCAACSSASCANNAFAFGPELSSLITPLAIQTHNFAAVAAAAYYRSQQQQQQQGLAPPAQPPAPPSATLPAGAAAPPSPPFSFQLPRRLSDSPVFDAPPSPPDSLSDRDSYLSGSLSSGSLSGSESPSLDPGRRLPIFSRLSISDD

SEQ ID NO: 360 - protein, 103 aa, Homo sapiens
MIRLGAPQSLVLLTLLVAAVLRCQGQDVQEAGSCVQDGQRYNDKDVWKPEPCRICVCDTGTVLCDDIICEDVKDCLSPEIPFGECCPICPTDLATASGQPGPK

SEQ ID NO: 361 - protein, 969 aa, Homo sapiens
MPPRAPPAPGPRPPPRAAAATDTAAGAGGAGGAGGAGGPGFRPLAPRPWRWLLLLALPAACSAPPPRPVYTNHWAVQVLGGPAEADRVAAAHGYLNLGQIGNLEDYYHFYHSKTFKRSTLSSRGPHTFLRMDPQVKWLQQQEVKRRVKRQVRSDPQALYFNDPIWSNMWYLHCGDKNSRCRSEMNVQAAWKRGYTGKNVVVTILDDGIERNHPDLAPNYDSYASYDVNGNDYDPSPRYDASNENKHGTRCAGEVAASANNSYCIVGIAYNAKIGGIRMLDGDVTDVVEAKSLGIRPNYIDIYSASWGPDDDGKTVDGPGRLAKQAFEYGIKKGRQGLGSIFVWASGNGGREGDYCSCDGYTNSIYTISVSSATENGYKPWYLEECASTLATTYSSGAFYERKIVTTDLRQRCTDGHTGTSVSAPMVAGIIALALEANSQLTWRDVQHLLVKTSRPAHLKASDWKVNGAGHKVSHFYGFGLVDAEALVVEAKKWTAVPSQHMCVAASDKRPRSIPLVQVLRTTALTSACAEHSDQRVVYLEHVVVRTSISHPRRGDLQIYLVSPSGTKSQLLAKRLLDLSNEGFTNWEFMTVHCWGEKAEGQWTLEIQDLPSQVRNPEKQGKLKEWSLILYGTAEHPYHTFSAHQSRSRMLELSAPELEPPKAALSPSQVEVPEDEEDYTAQSTPGSANILQTSVCHPECGDKGCDGPNADQCLNCVHFSLGSVKTSRKCVSVCPLGYFGDTAARRCRRCHKGCETCSSRAATQCLSCRRGFYHHQEMNTCVTLCPAGFYADESQKNCLKCHPSCKKCVDEPEKCTVCKEGFSLARGSCIPDCEPGTYFDSELIRCGECHHTCGTCVGPGREECIHCAKNFHFHDWKCVPACGEGFYPEEMPGLPHKVCRRCDENCLSCAGSSRNCSRCKTGFTQLGTSCITNHTCSNADETFCEMVKSNRLCERKLFIQFCCRTCLLAG

SEQ ID NO: 362 - protein, 843 aa, Homo sapiens
MGEPLTDSEKRKQISVRGLAGLGDVAEVRKSFNRHLHFTLVKDRNVATPRDYFFALAHTVRDHLVGRWIRTQQHYYERDPKRIYYLSLEFYMGRTLQNTMVNLGLQNACDEAIYQLGLDLEELEEIEEDAGLGNGGLGRLAACFLDSMATLGLAAYGYGIRYEFGIFNQKIVNGWQVEEADDWLRYGNPWEKARPEYMLPVHFYGRVEHTPDGVKWLDTQVVLAMPYDTPVPGYKNNTVNTMRLWSAKAPNDFKLQDFNVGDYIEAVLDRNLAENISRVLYPNDNFFEGKELRLKQEYFVVAATLQDIIRRFKSSKFGCRDPVRTCFETFPDKVAIQLNDTHPALSIPELMRILVDVEKVDWDKAWEITKKTCAYTNHTVLPEALERWPVSMFEKLLPRHLEIIYAINQRHLDHVAALFPGDVDRLRRMSVIEEGDCKRINMAHLCVIGSHAVNGVARIHSEIVKQSVFKDFYELEPEKFQNKTNGITPRRWLLLCNPGLADTIVEKIGEEFLTDLSQLKKLLPLVSDEVFIRDVAKVKQENKLKFSAFLEKEYKVKINPSSMFDVHVKRIHEYKRQLLNCLHVVTLYNRIKRDPAKAFVPRTVMIGGKAAPGYHMAKLIIKLVTSIGDVVNHDPVVGDRLKVIFLENYRVSLAEKVIPAADLSQQISTAGTEASGTGNMKFMLNGALTIGTMDGANVEMAEEAGAENLFIFGLRVEDVEALDRKGYNAREYYDHLPELKQAVDQISSGFFSPKEPDCFKDIVNMLMHHDRFKVFADYEAYMQCQAQVDQLYRNPKEWTKKVIRNIACSGKFSSDRTITEYAREIWGVEPSDLQIPPPNIPRD

SEQ ID NO: 363 - protein, 431 aa, Homo sapiens [sequence omitted]

SEQ ID NO: 364 - protein, 525 aa, Homo sapiens [sequence omitted]

SEQ ID NO: 365 - protein, 302 aa, Homo sapiens
MHYPTALLFLILANGAQAFRICAFNAQRLTLAKVAREQVMDTLVRILARCDIMVLQEVVDSSGSAIPLLLRELNRFDGSGPYSTLSSPQLGRSTYMETYVYFYRSHKTQVLSSYVYNDEDDVFAREPFVAQFSLPSNVLPSLVLVPLHTTPKAVEKELNALYDVFLEVSQHWQSKDVILLGDFNADCASLTKKRLDKLELRTEPGFHWVIADGEDTTVRASTHCTYDRVVLHGERCRSLLHTAAAFDFPTSFQLTEEEALNISDHYPVEVELKLSQAHSVQPLSLTVLLLLSLLSPQLCPAA

SEQ ID NO: 366 - protein, 1158 aa, Homo sapiens
MTHGEELGSDVHQDSIVLTYLEGLLMHQAAGGSGTAVDKKSAGHNEEDQNFNISGSAFPTCQSNGPVLNTHTYQGSGMLHLKKARLLQSSEDWNAAKRKRLSDSIMNLNVKKEALLAGMVDSVRKGKQDSTLLASLLQSFSSRLQTVALSQQIRQSLKEQGYALSHDSLKVEKDLRCYGVASSHLKTLLKKSKVKDQKPDTNLPDVTKNLIRDRFAESPHHVGQSGTKVMSEPLSCAARLQAVASMVEKRASPATSPKPSVACSQLALLLSSEAHLQQYSREHALKTQNANQAASERLAAMARLQENGQKDVGSYQLPKGMSSHLNGQARTSSSKLMASKSSATVFQNPMGIIPSSPKNAGYKNSLERNNIKQAANNSLLLHLLKSQTIPKPMNGHSHSERGSIFEESSTPTTIDEYSDNNPSFTDDSSGDESSYSNCVPIDLSCKHGTEKSESDQPVSLDNFTQSLLNTWDPKVPDVDIKEDQDTSKNSKLNSHQKVTLLQLLLGHKNEENVEKNTSPQGVHNDVSKFNTQNYARTSVIESPSTNRTTPVSTPPLLTSSKAGSPINLSQHSLVIKWNSPPYVCSTQSEKLTNTASNHSMDLTKSKDPPGEKPAQNEGAQNSATFSASKLLQNLAQCGMQSSMSVEEQRPSKQLLTGNTDKPIGMIDRLNSPLLSNKTNAVEENKAFSSQPTGPEPGLSGSEIENLLERRTVLQLLLGNPTKGRVKKKEKTPLRDESTQEHSERALSEQILMVKIKSEPCDDLQIPNTNVHLSHDAKSAPFLGMAPAVQRSAPALPVSEDFKSEPVSPQDFSFSKNGLLSRLLRQNQDSYLADDSDRSHRNNEMALLESKNLCMVPKKRKLYTEPLENPFKKMKNNIVDAANNHSAPEVLYGSLLNQEELKFSRNDLEFKYPAGHGSASESEHRSWARESKSFNVLKQLLLSENCVRDLSPHRSNSVADSKKKGHKNNVTNSKPEFSISSLNGLMYSSTQPSSCMDNRTFSYPGVVKTPVSPTFPEHLGCAGSRPESGLLNGCSMPSEKGPIKWVITDAEKNEYEKDSPRLTKTNPILYYMLQKGGNSVASRETQDKDIWREASSAESVSQVTAKEELLPTAETKASFFNLRSPYNSHMGNNASRPHSANGEVYGLLGSVLTIKKESE

SEQ ID NO: 367 - protein, 369 aa, Homo sapiens
  misc_feature (19)..(19): Xaa can be any naturally occurring amino acid
MKRVFWCLGTTILPPTLDXPGGPQPPMPPYAQPPYPGAPYPQPPFQPSPYGQPGYPHGPSPYPQGGYPQGPYPQGGYPQGPYPQEGYPQGPYPQGGYPQGPYPQSPFPPNPYGQPQVFPGQDPDSPQHGNYQEEGPPSYYDNQDFPATNWDDKSIRQAFIRKVFLVLTLQLSVTLSTVSVFTFVAEVKGFVRENVWTYYVSYAVFFISLIVLSCCGDFRRKHPWNLVALSVLTASLSYMVGMIASFYNTEAVIMAVGITTAVCFTVVIFSMQTRYDFTSCMGVLLVSMVVLFIFAILCIFIRNRILEIVYASLGALLFTCFLAVDTQLLLGNKQLSLSPEEYVFAALNLYTDIINIFLYILTIIGRAKE

SEQ ID NO: 368 - protein, 618 aa, Homo sapiens
MTGSRNWRATRDMCRYRHNYPDLVERDCNGDTPNLSFYRNEIRFLPNGCFIEDILQNWTDNYDLLEDNHSYIQWLFPLREPGVNWHAKPLTLREVEVFKSSQEIQERLVRAYAAHAGLLRDPAGGPRHGHGGPSTELPEALPEPELRSHNNLRITRILKSLGELGLEHFQAPLVRFFLEESLVRRELPGVRQSALDYFMFAVGCRHQRRQLVHFAWEHFRPRCKFVWGPQDKLRRFKPSSLPHPLEGSRKVEEEGSPGDPDHEASTQGRTCGPEHSKGGGRVDEGPQPRSVEPQDAGPLERSQGDEAGGHGEDRPEPLSPKESKKRKLELSRREQPPTEPGPQSASEVEKIALNLEGCALSQGSLRTGTQEVGGQDPGEAVQPCRQPLGARVADKVRKRRKVDEGAGDSAAVASGGAQTLALAGSPAPSGHPKAGHSENGVEEDTEGRTGPKEGTPGSPSETPGPSPAGPAGDEPAESPSETPGPRPAGPAGDEPAESPSETPGPRPAGPAGDEPAKTPSETPGPSPAGPTRDEPAESPSETPGPRPAGPAGDEPAESPSETPGPRPAGPAGDEPAESPSETPGPSPAGPTRDEPAKAGEAAELQDAEVESSAKSGKP

SEQ ID NO: 369 - protein, 663 aa, Homo sapiens
MIEKMQGSRMDEQRCSFPPPLKTEEDYIPYPSVHEVLGREGPFPLILLPQFGGYWIEGTNHEITSIPETEPLQSPTTKVKLECNPTARIYRKHFLGKEHFNYYSLDTALGHLVFSLKYDVIGDQEHLRLLLRTKCRTYHDVIPISCLTEFPNVVQMAKLVCEDVNVDRFYPVLYPKASRLIVTFDEHVISNNFKFGVIYQKLGQTSEEELFSTNEESPAFVEFLEFLGQKVKLQDFKGFRGGLDVTHGQTGTESVYCNFRNKEIMFHVSTKLPYTEGDAQQLQRKRHIGNDIVAVVFQDENTPFVPDMIASNFLHAYVVVQAEGGGPDGPLYKVSVTARDDVPFFGPPLPDPAVFRKGPEFQEFLLTKLINAEYACYKAEKFAKLEERTRAALLETLYEELHIHSQSMMGLGGDEDKMENGSGGGGFFESFKRVIRSRSQSMDAMGLSNKKPNTVSTSHSGSFAPNNPDLAKAAGISLIVPGKSPTRKKSGPFGSRRSSAIGIENIQEVQEKRESPPAGQKTPDSGHVSQEPKSENSSTQSSPEMPTTKNRAETAAQRAEALKDFSRSSSSASSFASVVEETEGVDGEDTGLESVSSSGTPHKRDSFIYSTWLEDSVSTTSGGSSPGPSRSPHPDAGKLGDPACPEIKIQLEASEQHMPQLGC

SEQ ID NO: 370 - protein, 207 aa, Homo sapiens
MSPLLRRLLLAALLQLAPAQAPVSQPDAPGHQRKVVSWIDVYTRATCQPREVVVPLTVELMGTVAKQLVPSCVTVQRCGGCCPDDGLECVPTGQHQVRMQILMIRYPSSQLGEMSLEEHSQCECRPKKKDSAVKPDRAATPHHRPQPRSVPGWDSAPGAPSPADITHPTPAPGPSAHAAPSTTSALTPGPAAAAADAAASSVAKGGA

SEQ ID NO: 371 - protein, 700 aa, Homo sapiens
MSRRTRCEDLDELHYQDTDSDVPEQRDSKCKVKWTHEEDEQLRALVRQFGQQDWKFLASHFPNRTDQQCQYRWLRVLNPDLVKGPWTKEEDQKVIELVKKYGTKQWTLIAKHLKGRLGKQCRERWHNHLNPEVKKSCWTEEEDRIICEAHKVLGNRWAEIAKMLPGRTDNAVKNHWNSTIKRKVDTGGFLSESKDCKPPVYLLLELEDKDGLQSAQPTEGQGSLLTNWPSVPPTIKEEENSEEELAAATTSKEQEPIGTDLDAVRTPEPLEEFPKREDQEGSPPETSLPYKWVVEAANLLIPAVGSSLSEALDLIESDPDAWCDLSKFDLPEEPSAEDSINNSLVQLQASHQQQVLPPRQPSALVPSVTEYRLDGHTISDLSRSSRGELIPISPSTEVGGSGIGTPPSVLKRQRKRRVALSPVTENSTSLSFLDSCNSLTPKSTPVKTLPFSPSQFLNFWNKQDTLELESPSLTSTPVCSQKVVVTTPLHRDKTPLHQKHAAFVTPDQKYSMDNTPHTPTPFKNALEKYGPLKPLPQTPHLEEDLKEVLRSEAGIELIIEDDIRPEKQKRKPGLRRSPIKKVRKSLALDIVDEDVKLMMSTLPKSLSLPTTAPSNSSSLTLSGIKEDNSLLNQGFLQAKPEKAAVAQKPRSHFTTPAPMSSAWKTVACGGTRDQLFMQEKARQLLGRLKPSHTSRTLILS

SEQ ID NO: 372 - protein, 912 aa, Homo sapiens
RMDSRPRAGCCEWLRCCGGGEARPRTVWLGHPEKRDQRYPRNVINNQKYNFFTFLPGVLFNQFKYFFNLYFLLLACSQFVPEMRLGALYTYWVPLGFVLAVTVIREAVEEIRCYVRDKEVNSQVYSRLTARGTVVGVVLYTGRELRSVMNTSNPRSKIGLFDLEVNCLTKILFGALVVVSLVMVALQHFAGRWYLQIIRFLLLFSNIIPISLRVNLDMGKIVYSWVIRRDSKIPGTVVRSSTIPEQLGRISYLLTDKTGTLTQNEMIFKRLHLGTVAYGLDSMDEVQSHIFSIYTQQSQDPPAQKGPTLTTKVRRTMSSRVHEAVKAIALCHNVTPVYESNGVTDQAEAEKQYEDSCRVYQASSPDEVALVQWTESVGLTLVGRDQSSMQLRTPGDQILNFTILQIFPFTYESKRMGIIVRDESTGEITFYMKGADVVMAGIVQYNDWLEEECGNMAREGLRVLVVAKKSLAEEQYQDFEARYVQAKLSVHDRSLKVATVIESLEMEMELLCLTGVEDQLQADVRPTLETLRNAGIKVWMLTGDKLETATCTAKNAHLVTRNQDIHVFRLVTNRGEAHLELNAFRRKHDCALVISGDSLEVCLKYYEYEFMELACQCPAVVCCRCAPTQKAQIVRLLQERTGKLTCAVGDGGNDVSMIQESDCGVGVEGKEGKQASLAADFSITQFKHLGRLLMVHGRNSYKRSAALSQFVIHRSLCISTMQAVFSSVFYFASVPLYQGFLIIGYSTIYTMFPVFSLVLDKDVKSEVAMLYPELYKDLLKGRPLSYKTFLIWVLISIYQGSTIMYGALLLFESEFVHIVAISFTSLILTELLMVALTIQTWHWLMTVAELLSLACYIASLVFLHEFIDVYFIATLSFLWKVSVITLVSCLPLYVLKYLRRRFSPPSYSKLTS

SEQ ID NO: 373 - protein, 914 aa, Homo sapiens
MFWKFDLNTTSHVDKLLDKEHVTLQELMDEDDILQECKAQNQKLLDFLCRQQCMEELVSLITQDPPLDMEEKVRFKYPNTACELLTCDVPQISDRLGGDESLLSLLYDFLDHEPPLNPLLASFFSKTIGNLIARKTEQVITFLKKKDKFISLVLKHIGTSALMDLLLRLVSCVEPAGLRQDVLHWLNEEKVIQRLVELIHPSQDEDRQSNASQTLCDIVRLGRDQGSQLQEALEPDPLLTALESQDCVEQLLKNMFDGDRTESCLVSGTQVLLTLLETRRVGTEGLVDSFSQGLERSYAVSSSVLHGIEPRLKDFHQLLLNPPKKKAILTTIGVLEEPLGNARLHGARLMAALLHTNTPSINQELCRLNTMDLLLDLFFKYTWNNFLHFQVELCIAAILSHAAREERTEASGSESRVEPPHENGNRSLETPQPAASLPDNTMVTHLFQKCCLVQRILEAWEANDHTQAAGGMRRGNMGHLTRIANAVVQNLERGPVQTHISEVIRGLPADCRGRWESFVEETLTETNRRNTVDLAFSDYQIQQMTANFVDQFGFNDEEFADQDDNINAPFDRIAEINFNIDADEDSPSAALFEACCSDRIQPFDDDEDEDIWEDSDTRCAARVMARPRFGAPHASESCSKNGPERGGQDGKASLEAHRDAPGAGAPPAPGKKEAPPVEGDSEAGAMWTAVFDEPANSTPTAPGVVRDVGSSVWAAGTSAPEEKGWAKFTDFQPFCCSESGPRCSSPVDTECSHAEGSRSQGPEKAFSPASPCAWNVCVTRKAPLLASDSSSSGGSHSEDGDQKAASAMDAVSRGPGREAPPLPTVARTEEAVGRVGCADSRLLSPACPAPKEVTAAPAVAVPPEATVAITTALSKAGPAIPTPAVSSALAVAVPLGPIMAVTAAPAMVATLGTV

SEQ ID NO: 374 - protein, 1212 aa, Homo sapiens
FMKNLLTEKCISSHNFHQKVIKQRMEKKVDSRYFKDGAVKKPYSAKTLSNKKSSASFGIRRELPSTSHLVQYRGTHTCTRQGRLRELRIRCVARKFLYLWIRMTFGRVFPSKARFYYEQRLLRKVFEEWKEEWWVFQHEWKLCVRADCHYRYYLYNLMFQTWKTYVRQQQEMRNKYIRAEVHDAKQKMRQAWKSWLIYVVVRRTKLQMQTTALEFRQRIILRVWWSTWRQRLGQVRVSRALHASALKHRALSLQVQAWSQWREQLLYVQKEKQKVVSAVKHHQHWQKRRFLKAWLEYLQVRRVKRQQNEMAERFHHVTVLQIHFCDWQQAWERRESLYAHHAQVEKLARKMALRRAFTHWKHYMLLCAEEAAQFEMAEEHHRHSQLLLHRFWNLWRSQIEQKKERELLPLLHAAWDHYRIALLCKCIELWLQYTQKRRYKQLLQARADGHFQQRALPAAFHTWNRLWRWRHQENVLSARATRFHRETLEKQVFSLWRQKMFQHRENRLAERMAILHAERQLLYRSWFMWHQQAAARHQEQEWQTVACAHHRHGRLKKAFCLWRESAQGLRTERTGRVRAAEFHMAQLLRWAWSQWRECLALRGAERQKLMRADLHHQHSVLHRALQAWVTYQGRVRSILREVAARESQHNRQLLRGALRRWKENTMARVDEAKKTFQASTHYRRTICSKVLVQWREAVSVQMYYRQQEDCAIWEAQKVLDRGCLRTWFQRWWDCSRRSAQQRLQLERAVQHHHRQLLLEGLARWKTHHLQCVRKRLLHRQSTQLLAQRLSRTCFRQWRQQLAARRQEQRATVRALWFWAFSLQAKVWATWLAFVLERRRKKARLQWALQAYQGQLLQEGATRLLRFAASMKASRQQLQAQQQVQAAHSLHRAVRRCATLWKQKVLGRGGKPQPLAAIAPSRKVTFEGPLLNRIAAGAGDGTLETKRPQASRPLGALGRLAAEEPHALELNTAHSARKQPRRPHFLLEPAQSQRPQKPQEHGLGMAQPAAPSLTRPFLAEAPTALVPHSPLPGALSSAPGPKQPPTASTGPELLLLPPSSFMPCGAAAPARVSAQRATPRDKPPVPSSLASVPDPHLLLPGDFSATRAGPGLSTAGSLDLEAELEEIQQQLLHYQTTKQNLWSCRRQASSLRRWLELNREEPGPEDQEVEQQVQKELEQVEMQIQLLAEELQAQRQPIGACVARIQALRQALC

SEQ ID NO: 375 - protein, 780 aa, Homo sapiens [sequence omitted]

SEQ ID NO: 376 - protein, 1142 aa, Homo sapiens
MAFCAKMRSSKKTEVNLEAPEPGVEVIFYLSDREPLRLGSGEYTAEELCIRAAQACRISPLCHNLFALYDENTKLWYAPNRTITVDDKMSLRLHYRMRFYFTNWHGTNDNEQSVWRHSPKKQKNGYEKKKIPDATPLLDASSLEYLFAQGQYDLVKCLAPIRDPKTEQDGHDIENECLGMAVLAISHYAMMKKMQLPELPKDISYKRYIPETLNKSIRQRNLLTRMRINNVFKDFLKEFNNKTICDSSVSTHDLKVKYLATLETLTKHYGAEIFETSMLLISSENEMNWFHSNDGGNVLYYEVMVTGNLGIQWRHKPNVVSVEKEKNKLKRKKLENKDKKDEEKNKIREEWNNFSFFPEITHIVIKESVVSINKQDNKKMELKLSSHEEALSFVSLVDGYFRLTADAHHYLCTDVAPPLIVHNIQNGCHGPICTEYAINKLRQEGSEEGMYVLRWSCTDFDNILMTVTCFEKSEQVQGAQKQFKNFQIEVQKGRYSLHGSDRSFPSLGDLMSHLKKQILRTDNISFMLKRCCQPKPREISNLLVATKKAQEWQPVYPMSQLSFDRILKKDLVQGEHLGRGTRTHIYSGTLMDYKDDEGTSEEKKIKVILKVLDPSHRDISLAFFEAASMMRQVSHKHIVYLYGVCVRDVENIMVEEFVEGGPLDLFMHRKSDVLTTPWKFKVAKQLASALSYLEDKDLVHGNVCTKNLLLAREGIDSECGPFIKLSDPGIPITVLSRQECIERIPWIAPECVEDSKNLSVAADKWSFGTTLWEICYNGEIPLKDKTLIEKERFYESRCRPVTPSCKELADLMTRCMNYDPNQRPFFRAIMRDINKLEEQNPDIVSRKKNQPTEVDPTHFEKRFLKRIRDLGEGHFGKVELCRYDPEDNTGEQVAVKSLKPESGGNHIADLKKEIEILRNLYHENIVKYKGICTEDGGNGIKLIMEFLPSGSLKEYLPKNKNKINLKQQLKYAVQICKGMDYLGSRQYVHRDLAARNVLVESEHQVKIGDFGLTKAIETDKEYYTVKDDRDSPVFWYAPECLMQSKFYIASDVWSFGVTLHELLTYCDSDSSPMALFLKMIGPTHGQMTVTRLVNTLKEGKRLPCPPNCPDEVYQLMRKCWEFQPSNRTSFQNLIEGFEALLK

SEQ ID NO: 377 - protein, 318 aa, Homo sapiens
MPNIVLFSGSSHQDLSQRVADRLGLELGKVVTKKFSNQETSVEIGESVRGEDVYIIQSGCGEINDNLMELLIMINACKIASSSRVTAVIPCFPYARQDKKDKSRAPISAKLVANMLSVAGADHIITMDLHASQIQGFFDIPVDNLYAEPAVLQWIRENIAEWKNCIIVSPDAGGAKRVTSIADRLNVEFALIHKERKKANEVDRMVLVGDVKDRVAILVDDMADTCGTICHAADKLLSAGATKVYAILTHGIFSGPAISRINNAAFEAVVVTNTIPQEDKMKHCTKIQVIDISMILAEAIRRTHNGESVSYLFSHVPL

SEQ ID NO: 378 - protein, 135 aa, Homo sapiens
MRGKTFRFEMQRDLVSFPLSPAVRVKLVSAGFQTAEELLEVKPSELSKEVGISKAEALETLQIIRRECLTNKPRYAGTSESHKKCTALELLEQEHTQGFIITFCSALDDILGGGVPLMKTTEICGAPGVGKTQLW

SEQ ID NO: 379 - protein, 829 aa, Homo sapiens [sequence omitted]

SEQ ID NO: 380 - protein, 761 aa, Homo sapiens
GGFAVQHQGPCAFYCDLPVGTLSPSRSSMERRSESPCLRDSPDRRSGSPDVKGPPPVKVARLEQNGSPMGARGRPNGAVAKAVGGLMIPVFCVVEQLDGSLEYDNREEHAEFVLVRKDVLFSQLVETALLALGYSHSSAAQAQGIIKLGRWNPLPLSYVTDAPDATVADMLQDVYHVVTLKIQLQSCSKLEDLPAEQWNHATVRNALKELLKEMNQSTLAKECPLSQSMISSIVNSTYYANVSATKCQEFGRWYKKYKKIKVERVERENLSDYCVLGQRPMHLPNMNQLASLGKTNEQSPHSQIHHSTPIRNQVPALQPIMSPGLLSPQLSPQLVRQQIAMAHLINQQIAVSRLLAHQHPQAINQQFLNHPPIPRAVKPEPTNSSVEVSPDIYQQVRDELKRASVSQAVFARVAFNRTQGLLSEILRKEEDPRTASQSLLVNLRAMQNFLNLPEVERDRIYQDERERSMNPNVSMVSSASSSPSSSRTPQAKTSTPTTDLPIKVDGANINITAAIYDEIQQEMKRAKVSQALFAKVAANKSQGWLCELLRWKENPSPENRTLWENLCTIRRFLNLPQHERDVIYEEESRHHHSERMQHVVQLPPEPVQVLHRQQSQPAKESSPPREEAPPPPPPTEDSCAKKPRSRTKISLEALGILQSFIHDVGLYPDQEAIHTLSAQLDLPKHTIIKFFQNQRYHVKHHGKLKEHLGSAVDVAEYKDEELLTESEENDSEEGSEEMYKVEAEEENADKSKAAPAEIDQR

SEQ ID NO: 381 - protein, 625 aa, Homo sapiens [sequence omitted]

SEQ ID NO: 382 - protein, 1004 aa, Homo sapiens
VTFMTSWVEFLRNIGLKYILSQQQLLQFAKEISVRANTENWSKETLQNTVDILLHHIFQERMDLLSGNFLKELSLIPFLCPERAPAEFIRFHPQYQEVNGTLPLIKFNGAQVNPKFKQCDVLQLLWTSCPILPEKATPLSIKEQEGSDLGPQEQLEQVLNMLNVNLDPPLDKVINNCRNICNITTLDEEMVKTRAKVLRSIYEFLSAEKREFRFQLRGVAFVMVEDGWKLLKPEEVVINLEYESDFKPYLYKLPLELGTFHQLFKHLGTEDIISTKQYVEVLSRIFKNSEGKQLDPNEMRTVKRVVSGLFRSLQNDSVKVRSDLENVRDLALYLPSQDGRLVKSSILVFDDAPHYKSRIQGNIGVQMLVDLSQCYLGKDHGFHTKLIMLFPQKLRPRLLSSILEEQLDEETPKVCQFGALCSLQGRLQLLLSSEQFITGLIRIMKHENDNAFLANEEKAIRLCKALREGLKVSCFEKLQTTLRVKGFNPIPHSRSETFAFLKRFGNAVILLYIQHSDSKDINFLLALAMTLKSATDNLISDTSYLIAMLGCNDIYRIGEKLDSLGVKYDSSEPSKLELPMPGTPIPAEIHYTLLMDPMNVFYPGEYVGYLVDAEGGDIYGSYQPTYTYAIIVQEVEREDADNSSFLGKIYQIDIGYSEYKIVSSLDLYKFSRPEESSQSRDSAPSTPTSPTEFLTPGLRSIPPLFSGRESHKTSSKHQSPKKLKVNSLPEILKEVTSVVEQAWKLPESERKKIIRRLYLKWHPDKNPENHDIANEVFKHLQNEINRLEKQAFLDQNADRASRRTFSTSASRFQSDKYSFQRFYTSWNQEATSHKSERQQQNKEKCPPSAGQTYSQRFFVPPTFKSVGNPVEARRWLRQARANFSAARNDLHKNANEWVCFKCYLSTKLALIAADYAVRGKSDKDVKPTALAQKIEEYSQQLEGLTNDVHTLEAYGVDSLKTRYPDLLPFPQIPNDRFTSEVAMRVMECTACIIIKLENFMQQKV

SEQ ID NO: 383 - protein, 72 aa, Homo sapiens
MRPCIWIHVHLKPPCRLVELLPFSSALQGLSHLSLGTTLPVILPERNEEQNLQELSHNADKYQMGDCCKEEI

SEQ ID NO: 384 - protein, 616 aa, Homo sapiens
MKALRLSASALFCLLLINGLGAAPPGRPEAQPPPLSSEHKEPVAGDAVPGPKDGSAPEVRGARNSEPQDEGELFQGVDPRALAAVLLQALDRPASPPAPSGSQQGPEEEAAEALLTETVRSQTHSLPAAGEPEPAAPPRPQTPENGPEASDPSEELEALASLLQELRDFSPSSAKRQQETAAAETETRTHTLTRVNLESPGPERVWRASWGEFQARVPERAPLPPPAPSQFQARMPDSGPLPETHKFGEGVSSPKTHLGEALAPLSKAYQGVAAPFPKARRAESALLGGSEAGERLLQQGLAQVEAGRRQAEATRQAAAQEERLADLASDLLLQYLLQGGARQRGLGGRGLQEAAEERESAREEEEAEQERRGGEERVGEEDEEAAEAAEAEADEAERARQNALLFAEEEDGEAGAEDKRSQEETPGHRRKEAEGTEEGGEEEDDEEMDPQTIDSLIELSTKLHLPADDVVSIIEEVEEKRNRKKKAPPEPVPPPRAAPAPTHVRSPQPPPPPPSARDELPDWNEVLPPWDREEDEVYPPGPYHPFPNYIRPRTLQPPSALRRRHYHHALPPSRHYPGREAQARHAQQEEAEAEERRLQEQEELENYIEHVLLRRP

SEQ ID NO: 385 - protein, 399 aa, Homo sapiens
MAQRAFPNPYADYNKSLAEGYFDAAGRLTPEFSQRLTNKIRELLQQMERGLKSADPRDGTGYTGWAGIAVLYLHLYDVFGDPAYLQLAHGYVKQSLNCLTKRSITFLCGDAGPLAVAAVLYHKMNNEKQAEDCITRLIHLNKIDPHAPNEMLYGRIGYIYALLFVNKNFGVEKIPQSHIQQICETILTSGENLARKRNFTAKSPLMYEWYQEYYVGAAHGLAGIYYYLMQPSLQVSQGKLHSLVKPSVDYVCQLKFPSGNYPPCIGDNRDLLVHWCHGAPGVIYMLIQAYKVFREEKYLCDAYQCADVIWQYGLLKKGYGLCHGSAGNAYAFLTLYNLTQDMKYLYRACKFAEWCLEYGEHGCRTPDTPFSLFEGMAGTIYFLADLLVPTKARFPAFEL

SEQ ID NO: 386 - protein, 362 aa, Homo sapiens
MTQVDQEDITLQSGRDELNEELIQEESSEDEGEYEEVRKDQDSVGEMKDEGEETLNYPDTTIDLSHLQPQRSIQKLASKEESSNSSDSKSQSRRHLSAKERREMKKKKLPSDSGDLEALEGKDKEKESTVHIETHQNTSKNVAAVQPMKRGQKSKMKKMKEKYKDQDEEDRELIMKLLGSAGSNKEEKGKKGKKGKTKDEPVKKQPQKPRGGQRVSDNIKKETPFLEVITHELQDFAVDDPHDDKEEQDLDQQGNEENLFDSLTGQPHPEDVLLFAIPICAPYTTMTNYKYKVKLTPGVQKKGKAAKTALNSFMHSKEATAREKDLFRSVKDTDLSRNIPGKVKSVCTQSSERKKEIAEMKF

SEQ ID NO: 387 - protein, 174 aa, Homo sapiens
MLRTESCRPRSPAGQVAAASPLLLLLLLLAWCAGACRGAPILPQGLQPEQQLQLWNEIDDTCSSFLSIDSQPQASNALEELCFMIMGMLPKPQEQDEKDNTKRFLFHYSKTQKLGKSNVVSSVVHPLLQLVPHLHERRMKRFRVDEEFQSPFASQSRGYFLFRPRNGRRSAGFI

SEQ ID NO: 388 - protein, 442 aa, Homo sapiens [sequence omitted]

SEQ ID NO: 389 - protein, 358 aa, Homo sapiens
MEAPGLAQAAAAESDSRKVAEETPDGAPALCPSPEALSPEPPVYSLQDFDTLATVGTGTFGRVHLVKEKTAKHFFALKVMSIPDVIRLKQEQHVHNEKSVLKEVSHPFLIRLFWTWHDERFLYMLMEYVPGGELFSYLRNRGRFSSTTGLFYSAEIICAIEYLHSKEIVYRDLKPENILLDRDGHIKLTDFGFAKKLVDRTWTLCGTPEYLAPEVIQSKGHGRAVDWWALGILIFEMLSGFPPFFDDNPFGIYQKILAGKIDFPRHLDFHVKDLIKKLLVVDRTRRLGNMKNGANDVKHHRWFRSVDWEAVPQRKLKPPIVPKIAGDGDTSNFETYPENDWDTAAPVPQKDLEIFKNF

SEQ ID NO: 390 - protein, 183 aa, Homo sapiens
MREYKVVVLGSGGVGKSALTVQFVTGTFIEKYDPTIEDFYRKEIEVDSSPSVLEILDTAGTEQFASMRDLYIKNGQGFILVYSLVNQQSFQDIKPMRDQIIRVKRYEKVPVILVGNKVDLESEREVSSSEGRALAEEWGCPFMETSAKSKTMVDELFAEIVRQMNYAAQPDKDDPCCSACNIQ

SEQ ID NO: 391 - DNA, 21 bp, Homo sapiens
ctgaaccctttgggaaagaac

SEQ ID NO: 392 - DNA, 20 bp, Homo sapiens
aggcttagacctgcgtgtgt

SEQ ID NO: 393 - DNA, 21 bp, Homo sapiens
gcagtttccatcaccgaatta

SEQ ID NO: 394 - DNA, 21 bp, Homo sapiens
aatccactgctttcatcatgg

SEQ ID NO: 395 - DNA, 21 bp, Homo sapiens
aactgtccatcaggtgaggtg

SEQ ID NO: 396 - DNA, 21 bp, Homo sapiens
ctttgagggcttctttgacct

SEQ ID NO: 397 - DNA, 21 bp, Homo sapiens
gcccagaaaagggtatacagc

SEQ ID NO: 398 - DNA, 21 bp, Homo sapiens
gtgtaccggagaaggaggatc

SEQ ID NO: 399 - DNA, 21 bp, Homo sapiens
tattagggcccgttcacttct

SEQ ID NO: 400 - DNA, 21 bp, Homo sapiens
tgatcatgtcatgtttcgcat

SEQ ID NO: 401 - DNA, 21 bp, Homo sapiens
atggcacctctccctaggata

SEQ ID NO: 402 - DNA, 21 bp, Homo sapiens
acaagtggcattggactcatc

SEQ ID NO: 403 - DNA, 21 bp, Homo sapiens
gattgcctggacaacagtgat

SEQ ID NO: 404 - DNA, 21 bp, Homo sapiens
aagagcttcataaagggctgc

SEQ ID NO: 405 - DNA, 20 bp, Homo sapiens
gtcgtgactccagagaagcc

SEQ ID NO: 406 - DNA, 21 bp, Homo sapiens
tgtagtgatggcacgtcagag

SEQ ID NO: 407 - DNA, 21 bp, Homo sapiens
aaggccattctgagtatccgt

SEQ ID NO: 408 - DNA, 21 bp, Homo sapiens
caggtccagggtatagcttcc

SEQ ID NO: 409 - DNA, 21 bp, Homo sapiens
aagaaccgagaaggagagacg

SEQ ID NO: 410 - DNA, 21 bp, Homo sapiens
cactgtcacaaccccaatttc

SEQ ID NO: 411 - DNA, 21 bp, Homo sapiens
agagtgaaaaggcctctcctg

SEQ ID NO: 412 - DNA, 21 bp, Homo sapiens
tacggtatgtctccctgcaac

SEQ ID NO: 413 - DNA, 21 bp, Homo sapiens
gtgggagcgaaagttgtaaca

SEQ ID NO: 414 - DNA, 21 bp, Homo sapiens
gggtaatcctcccaaatcaaa

SEQ ID NO: 415 - DNA, 21 bp, Homo sapiens
ggttggcaatagaaggtgaca

SEQ ID NO: 416 - DNA, 21 bp, Homo sapiens
tacacctccaccactcagacc

SEQ ID NO: 417 - DNA, 21 bp, Homo sapiens
aagtatcacgagaagcaggca

SEQ ID NO: 418 - DNA, 21 bp, Homo sapiens
gctgcagtggaccatatcaat

SEQ ID NO: 419 - DNA, 21 bp, Homo sapiens
aaaaacaaaccgatgttgctg

SEQ ID NO: 420 - DNA, 21 bp, Homo sapiens
accttccagaaatcctctcca

SEQ ID NO: 421 - DNA, 21 bp, Homo sapiens
ggggccattgctataaatcat

SEQ ID NO: 422 - DNA, 21 bp, Homo sapiens
tgaaaccagaaggggactttt

SEQ ID NO: 423 - DNA, 21 bp, Homo sapiens
taccaacggtttgactcttgg

SEQ ID NO: 424 - DNA, 21 bp, Homo sapiens
aaaaacacagcaagggtgatg

SEQ ID NO: 425 - DNA, 21 bp, Homo sapiens
aatactctctgcacggcttca

SEQ ID NO: 426 - DNA, 21 bp, Homo sapiens
atccaataattgggtgggatc

SEQ ID NO: 427 - DNA, 21 bp, Homo sapiens
caacacgaagacccagatcat

SEQ ID NO: 428 - DNA, 21 bp, Homo sapiens
aacatgaaacagttcatccgc

SEQ ID NO: 429 - DNA, 21 bp, Homo sapiens
gctcatgctcctgtactcgtc

SEQ ID NO: 430 - DNA, 21 bp, Homo sapiens
ctcttccttctgttgctccct

SEQ ID NO: 431 - DNA, 21 bp, Homo sapiens
acagatgaagttgccatccac

SEQ ID NO: 432 - DNA, 21 bp, Homo sapiens
tactggtggttgagttcctgg

SEQ ID NO: 433 - DNA, 21 bp, Homo sapiens
gatgcaattgaccgtgaagtt

SEQ ID NO: 434 - DNA, 21 bp, Homo sapiens
gacagcgaaggagactcgttt

SEQ ID NO: 435 - DNA, 22 bp, Homo sapiens
tctgtcccagctccttgagact

SEQ ID NO: 436 - DNA, 21 bp, Homo sapiens
ttccacccagttgaaagacac

SEQ ID NO: 437 - DNA, 21 bp, Homo sapiens
ggaagaggaggaggaaggaat

SEQ ID NO: 438 - DNA, 21 bp, Homo sapiens
ctggcatttgagctattcagc

SEQ ID NO: 439 - DNA, 21 bp, Homo sapiens
ctgaagtctgtgcccaaagag

SEQ ID NO: 440 - DNA, 21 bp, Homo sapiens
gtcagcgagatggtgaagaag

SEQ ID NO: 441 - DNA, 20 bp, Homo sapiens
agaaggctgaggagaaagcc

SEQ ID NO: 442 - DNA, 21 bp, Homo sapiens
caggactctggcttctctcct

SEQ ID NO: 443 - DNA, 21 bp, Homo sapiens
tttcagtggcattcctaatgg

SEQ ID NO: 444 - DNA, 21 bp, Homo sapiens
gtgactgcatccagtttggtt

SEQ ID NO: 445 - DNA, 21 bp, Homo sapiens
aaaccatgtgatttgcctctg

SEQ ID NO: 446 - DNA, 21 bp, Homo sapiens
atcctcaaccccatccagtac

SEQ ID NO: 447 - DNA, 21 bp, Homo sapiens
acctcatcagctaccacatgg

SEQ ID NO: 448 - DNA, 21 bp, Homo sapiens
atctcctgtctggtccgagag

SEQ ID NO: 449 - DNA, 21 bp, Homo sapiens
cgagctgttgactggaagaac

SEQ ID NO: 450 - DNA, 21 bp, Homo sapiens
taaagcagttatgtggggacg

SEQ ID NO: 451 - DNA, 21 bp, Homo sapiens
catcaactacgtgggcttcat

SEQ ID NO: 452 - DNA, 21 bp, Homo sapiens
aggatgagtacctgcccatct

SEQ ID NO: 453 - DNA, 21 bp, Homo sapiens
cagaaacgatcaacacggaat

SEQ ID NO: 454 - DNA, 21 bp, Homo sapiens
ttgcaaaggcatcttctcagt

SEQ ID NO: 455 - DNA, 21 bp, Homo sapiens
tctagagcagtgaccctggaa

SEQ ID NO: 456 - DNA, 21 bp, Homo sapiens
actgtacccttccctcttcca

SEQ ID NO: 457 - DNA, 21 bp, Homo sapiens
gaactgtggcttgtgatccat

SEQ ID NO: 458 - DNA, 21 bp, Homo sapiens
tcaggcttcctaaaagttgca

SEQ ID NO: 459 - DNA, 21 bp, Homo sapiens
tccctcgcacattcagataac

SEQ ID NO: 460 - DNA, 21 bp, Homo sapiens
agagaaggaagggcttcagtg

SEQ ID NO: 461 - DNA, 21 bp, Homo sapiens
ctccttctgctgacattggag

SEQ ID NO: 462 - DNA, 21 bp, Homo sapiens
tgtggcttggagatgaatagg

SEQ ID NO: 463 - DNA, 21 bp, Homo sapiens
gaatgactcaaatgcccaaaa

SEQ ID NO: 464 - DNA, 21 bp, Homo sapiens
gtatgaccgaggagtcccttc

SEQ ID NO: 465 - DNA, 21 bp, Homo sapiens
cacacccctgcctattctgta

SEQ ID NO: 466 - DNA, 21 bp, Homo sapiens
atggccttgcttatcggtact

SEQ ID NO: 467 - DNA, 21 bp, Homo sapiens
aaggaacagttggccaagaat

SEQ ID NO: 468 - DNA, 21 bp, Homo sapiens
aatgctacctgtggtcgaatg

SEQ ID NO: 469 - DNA, 21 bp, Homo sapiens
aacaagactctgaaggcgaca

SEQ ID NO: 470 - DNA, 21 bp, Homo sapiens
accacatgtggaaccagagag

SEQ ID NO: 471 - DNA, 21 bp, Homo sapiens
gacaggccatggctacgtata

SEQ ID NO: 472 - DNA, 21 bp, Homo sapiens
cccaccatagaatttctgcaa

SEQ ID NO: 473 - DNA, 21 bp, Homo sapiens
aggaggaagaagaacgtcgag

SEQ ID NO: 474 - DNA, 21 bp, Homo sapiens
attgttgatgccttccaacag

SEQ ID NO: 475 - DNA, 21 bp, Homo sapiens
tctacctgccacccctacttt

SEQ ID NO: 476 - DNA, 21 bp, Homo sapiens
agaacggtcttgggacttgtt

SEQ ID NO: 477 - DNA, 21 bp, Homo sapiens
gcaatgaccgtttgactgttt

SEQ ID NO: 478 - DNA, 21 bp, Homo sapiens
aagaccacagccatgacaaac

SEQ ID NO: 479 - DNA, 21 bp, Homo sapiens
gagggctctacctgagaagga

SEQ ID NO: 480 - DNA, 21 bp, Homo sapiens
taaccctttttggtcttggct

SEQ ID NO: 481 - DNA, 21 bp, Homo sapiens
gttaggtactggctaaccggg

SEQ ID NO: 482 - DNA, 21 bp, Homo sapiens
gggaaagtccaggtggtagag

SEQ ID NO: 483 - DNA, 21 bp, Homo sapiens
ccatgtctgacctgcaaaaat

SEQ ID NO: 484 - DNA, 21 bp, Homo sapiens
ctccagcttcagtctcccttt

SEQ ID NO: 485 - DNA, 21 bp, Homo sapiens
ctggaacagttcaaatcccaa

SEQ ID NO: 486 - DNA, 21 bp, Homo sapiens
caagtgaccaacagcaaaaca

SEQ ID NO: 487 - DNA, 21 bp, Homo sapiens
agtcagacattgccaacatcc

SEQ ID NO: 488 - DNA, 21 bp, Homo sapiens
agagtgggtgaccaacatcag

SEQ ID NO: 489 - DNA, 21 bp, Homo sapiens
aagcccagatatttggaggaa

SEQ ID NO: 490 - DNA, 21 bp, Homo sapiens
ccatggaggtcttcagcatta

SEQ ID NO: 491 - DNA, 21 bp, Homo sapiens
atcgataccgactgcattttg

SEQ ID NO: 492 - DNA, 21 bp, Homo sapiens
ggactccggaaggttacagtc

SEQ ID NO: 493 - DNA, 21 bp, Homo sapiens
actctccggattgaccaagtt

SEQ ID NO: 494 - DNA, 21 bp, Homo sapiens
tcaccacagctgaaggaaatt

SEQ ID NO: 495 - DNA, 21 bp, Homo sapiens
cctgtaacatagcccgaaaca

SEQ ID NO: 496 - DNA, 21 bp, Homo sapiens
ttccctgggtggaaaaatatc

SEQ ID NO: 497 - DNA, 21 bp, Homo sapiens
tctgacatcttgattccaggg

SEQ ID NO: 498 - DNA, 21 bp, Homo sapiens
agcggaaaatgaagctagagg

SEQ ID NO: 499 - DNA, 21 bp, Homo sapiens
gaaaagacccaaggtttctgg

SEQ ID NO: 500 - DNA, 21 bp, Homo sapiens
caactgcagatggagaaggag

SEQ ID NO: 501 - DNA, 21 bp, Homo sapiens
tggtttggcaacaggtatctc

SEQ ID NO: 502 - DNA, 21 bp, Homo sapiens
tgaatatgggttcccatcaaa

SEQ ID NO: 503 - DNA, 21 bp, Homo sapiens
ccagtctcctttcttcctgct

SEQ ID NO: 504 - DNA, 21 bp, Homo sapiens
ctcttcctgctattcctgcct

SEQ ID NO: 505 - DNA, 21 bp, Homo sapiens
gttcattctggtgcatgaggt

SEQ ID NO: 506 - DNA, 21 bp, Homo sapiens
gtttgagtgcaggacagaagg

SEQ ID NO: 507 - DNA, 21 bp, Homo sapiens
ttacagcttgagggaaaagca

SEQ ID NO: 508 - DNA, 21 bp, Homo sapiens
ctgaagccattgaaaaagctg

SEQ ID NO: 509 - DNA, 21 bp, Homo sapiens
aggctttctccaaaagtgagc

SEQ ID NO: 510 - DNA, 21 bp, Homo sapiens
ttgacttctctctgcgctctc

SEQ ID NO: 511 - DNA, 21 bp, Homo sapiens
ccaaaccaagtgtccagaaaa

SEQ ID NO: 512 - DNA, 21 bp, Homo sapiens
gtgaatgcaggaggtgtgatt

SEQ ID NO: 513 - DNA, 21 bp, Homo sapiens
cctctgtgaagcattcgagac

SEQ ID NO: 514 - DNA, 21 bp, Homo sapiens
attatcaccagcaccagttcg

SEQ ID NO: 515 - DNA, 21 bp, Homo sapiens
gagagaataaccatccgggac

SEQ ID NO: 516 - DNA, 21 bp, Homo sapiens
caggtacgaattttgcggtta

SEQ ID NO: 517 - DNA, 21 bp, Homo sapiens
tacgagtgcaacatctgcaag

SEQ ID NO: 518 - DNA, 21 bp, Homo sapiens
atgggaattggtctttctgct

SEQ ID NO: 519 - DNA, 21 bp, Homo sapiens
gaggtcctggatagctccaac

SEQ ID NO: 520 - DNA, 21 bp, Homo sapiens
gctgaaaggaaagcagatgtg

SEQ ID NO: 521 - DNA, 21 bp, Homo sapiens
aggcctcattgaggtggtact

SEQ ID NO: 522 - DNA, 21 bp, Homo sapiens
ttttccgttgcagctgttaat

SEQ ID NO: 523 - DNA, 21 bp, Homo sapiens
gacgagtttgagcacaagagg

SEQ ID NO: 524 - DNA, 21 bp, Homo sapiens
accctgaagatcaccgacttt

SEQ ID NO: 525 - DNA, 21 bp, Homo sapiens
ctagatggggaggaagtccag

SEQ ID NO: 526 - DNA, 21 bp, Homo sapiens
tgagatgccactgactgacag

SEQ ID NO: 527 - DNA, 21 bp, Homo sapiens
acttcatcaatgatggcttgg

SEQ ID NO: 528 - DNA, 21 bp, Homo sapiens
gtacatcagcaagaaccccaa

SEQ ID NO: 529 - DNA, 21 bp, Homo sapiens
gactacggagtggaggaggag

SEQ ID NO: 530 - DNA, 21 bp, Homo sapiens
cctgtgccataaaatgtgctt

SEQ ID NO: 531 - DNA, 21 bp, Homo sapiens
agccatagttgagccctgatt

SEQ ID NO: 532 - DNA, 21 bp, Homo sapiens
ctcacctcagcatttagcagg

SEQ ID NO: 533 - DNA, 21 bp, Homo sapiens
aagtcattgcctgctcaagaa

SEQ ID NO: 534 - DNA, 21 bp, Homo sapiens
actggtgaggtttgtccaatg

SEQ ID NO: 535 - DNA, 21 bp, Homo sapiens
cagacaaagatgaggcagagg

SEQ ID NO: 536 - DNA, 21 bp, Homo sapiens
tctactctcaactccagggca

SEQ ID NO: 537 - DNA, 21 bp, Homo sapiens
gaatgtcaaggcaaagatcca

SEQ ID NO: 538 - DNA, 21 bp, Homo sapiens
cgctttgacaagaggattgag

SEQ ID NO: 539 - DNA, 21 bp, Homo sapiens
ctttgtcatcattgcccaact

SEQ ID NO: 540 - DNA, 21 bp, Homo sapiens
tacacttccacagtcagcacg

SEQ ID NO: 541 - DNA, 21 bp, Homo sapiens
caagtactaccttcctgggcc

SEQ ID NO: 542 - DNA, 21 bp, Homo sapiens
tcaccatcacatctccaatga

SEQ ID NO: 543 - DNA, 21 bp, Homo sapiens
cattaggacacgtcatgcctt

SEQ ID NO: 544 - DNA, 21 bp, Homo sapiens
tatagcaacagcgtgtgcaag

SEQ ID NO: 545 - DNA, 21 bp, Homo sapiens
atgagcacagagaacgcatct

SEQ ID NO: 546 - DNA, 21 bp, Homo sapiens
cccaaaagttgtcaggttgaa

SEQ ID NO: 547 - DNA, 21 bp, Homo sapiens
acatgaatatgggcacagagc

SEQ ID NO: 548 - DNA, 21 bp, Homo sapiens
cttagcaatgagatgcaagcc

SEQ ID NO: 549 - DNA, 21 bp, Homo sapiens
cattgagttgagctggcctag

SEQ ID NO: 550 - DNA, 21 bp, Homo sapiens
tttcatggctgatcagagctt

SEQ ID NO: 551 - DNA, 21 bp, Homo sapiens
tctgtgttagtccctgggatg

SEQ ID NO: 552 - DNA, 21 bp, Homo sapiens
tcctctcggtcatcttctcaa

SEQ ID NO: 553 - DNA, 21 bp, Homo sapiens
caagtacctgagtgaggcctg

SEQ ID NO: 554 - DNA, 21 bp, Homo sapiens
ttccagaacttctccctccat

SEQ ID NO: 555 - DNA, 21 bp, Homo sapiens
agcaccttatccgaaggatgt

SEQ ID NO: 556 - DNA, 21 bp, Homo sapiens
atgaggtccaccacaagacag

SEQ ID NO: 557 - DNA, 21 bp, Homo sapiens
atccagaaacatgtcgaccac

SEQ ID NO: 558 - DNA, 21 bp, Homo sapiens
cttgctcctttcttttgcatg

SEQ ID NO: 559 - DNA, 21 bp, Homo sapiens
taaaaagtgcgtggatgaacc

SEQ ID NO: 560 - DNA, 21 bp, Homo sapiens
ggtcagtgacgaggtgttcat

SEQ ID NO: 561 - DNA, 21 bp, Homo sapiens
aggatgggtctgaacgacttt

SEQ ID NO: 562 - DNA, 21 bp, Homo sapiens
gggaactgtttaagggtgagc

SEQ ID NO: 563 - DNA, 21 bp, Homo sapiens
ctcatttgtcccaacagcatt

SEQ ID NO: 564 - DNA, 21 bp, Homo sapiens
gagacagggctgtgttctgag

SEQ ID NO: 565 - DNA, 21 bp, Homo sapiens
tcctccttgcgtagaagttga

SEQ ID NO: 566 - DNA, 20 bp, Homo sapiens
tgttcacttttgttgcggag

SEQ ID NO: 567 - DNA, 21 bp, Homo sapiens
gggaggtcgaggtgtttaaaa

SEQ ID NO: 568 - DNA, 21 bp, Homo sapiens
atttgggttctgctgtgtgac

SEQ ID NO: 569 - DNA, 21 bp, Homo sapiens
aagaggggtcacataccagct

SEQ ID NO: 570 - DNA, 21 bp, Homo sapiens
accagtctgtccttcctggat

SEQ ID NO: 571 - DNA, 21 bp, Homo sapiens
ctcagtatcgtctccagccag

SEQ ID NO: 572 - DNA, 20 bp, Homo sapiens
ccgtgaggagaggacagaag

SEQ ID NO: 573 - DNA, 21 bp, Homo sapiens
cgattccatcatgtcactgtg

SEQ ID NO: 574 - DNA, 21 bp, Homo sapiens
cacttccgtgttcccttacaa

SEQ ID NO: 575 - DNA, 21 bp, Homo sapiens
tgaagcctgagagtggaggta

SEQ ID NO: 576 - DNA, 21 bp, Homo sapiens
acttgtggccaatatgctgtc

SEQ ID NO: 577 - DNA, 21 bp, Homo sapiens
cctttcatgtctcccactgaa

SEQ ID NO: 578 - DNA, 21 bp, Homo sapiens
tccgagcttagcaaagaagtg

SEQ ID NO: 579 - DNA, 21 bp, Homo sapiens
tgttgaataagccactggacc

SEQ ID NO: 580 - DNA, 21 bp, Homo sapiens
tgttgtgacgttgaaaatcca

SEQ ID NO: 581 - DNA, 21 bp, Homo sapiens
tttcgaaagaaagcagtggaa

SEQ ID NO: 582 - DNA, 21 bp, Homo sapiens
acgacgttggatgaagaaatg

SEQ ID NO: 583 - DNA, 21 bp, Homo sapiens
aaatacgggtcctgcttagga

SEQ ID NO: 584 - DNA, 21 bp, Homo sapiens
tctatttttcagtctccggca

SEQ ID NO: 585 - DNA, 21 bp, Homo sapiens
ttcttggtcttggaactccct

SEQ ID NO: 586 - DNA, 21 bp, Homo sapiens
caggatcagcttcctccttct

SEQ ID NO: 587 - DNA, 20 bp, Homo sapiens
ggtgactcgagcagtgatga

SEQ ID NO: 588 - DNA, 21 bp, Homo sapiens
tggaggagctttgctttatga

SEQ ID NO: 589 - DNA, 21 bp, Homo sapiens
tcttcttgcagctagaaagcg

SEQ ID NO: 590 - DNA, 21 bp, Homo sapiens
accttttcttcacgtggaggt

SEQ ID NO: 591 - DNA, 21 bp, Homo sapiens
cagagcttccaggacatcaag

SEQ ID NO: 592 - DNA, 21 bp, Homo sapiens
aagcgcttgtatgtaaggggt

SEQ ID NO: 593 - DNA, 20 bp, Homo sapiens
ctgtccactgctcctccttc

SEQ ID NO: 594 - DNA, 21 bp, Homo sapiens
atcaaaactttcccacctgct

SEQ ID NO: 595 - DNA, 21 bp, Homo sapiens
tgttcagctgacaacagatcg

SEQ ID NO: 596 - DNA, 21 bp, Homo sapiens
ttcattgggccctttaagtct

SEQ ID NO: 597 - DNA, 21 bp, Homo sapiens
ttatgctggcaaactgagctt

SEQ ID NO: 598 - DNA, 21 bp, Homo sapiens
ctgggctcccttttacatttc

SEQ ID NO: 599 - DNA, 21 bp, Homo sapiens
ttattggggtctggtttttcc

SEQ ID NO: 600 - DNA, 21 bp, Homo sapiens
cctctgcagttctctccattg

SEQ ID NO: 601 - DNA, 21 bp, Homo sapiens
catttgctaaacaggtggcat

SEQ ID NO: 602 - DNA, 21 bp, Homo sapiens
ctgatgctttggggtaaacaa

SEQ ID NO: 603 - DNA, 21 bp, Homo sapiens
cagtttcccagtttccctttc

SEQ ID NO: 604 - DNA, 21 bp, Homo sapiens
acaagtggcattggactcatc

SEQ ID NO: 605 - DNA, 21 bp, Homo sapiens
tggtcactacagactttgggg

SEQ ID NO: 606 - DNA, 20 bp, Homo sapiens
aggtccaggttgtggtcttg

SEQ ID NO: 607 - DNA, 21 bp, Homo sapiens
gggatagactcggaagacacc

SEQ ID NO: 608 - DNA, 21 bp, Homo sapiens
tggtcttccagatgtgtaggg

SEQ ID NO: 609 - DNA, 21 bp, Homo sapiens
tttgtcacaaccttcagggtc

SEQ ID NO: 610 - DNA, 21 bp, Homo sapiens
ttacctccatctgacaccgtc

SEQ ID NO: 611 - DNA, 21 bp, Homo sapiens
accactgtacggaatgtgagg

SEQ ID NO: 612 - DNA, 21 bp, Homo sapiens
ccttccatcctaaccccaata

SEQ ID NO: 613 - DNA, 21 bp, Homo sapiens
ccttggctagctctaagggaa

SEQ ID NO: 614 - DNA, 21 bp, Homo sapiens
tttgagatgtggaaccaggtc

SEQ ID NO: 615 - DNA, 21 bp, Homo sapiens
tccataccacaaacatcagca

SEQ ID NO: 616 - DNA, 21 bp, Homo sapiens
gagcaccaaaaagctcatcag

SEQ ID NO: 617 - DNA, 21 bp, Homo sapiens
gaaaccataagggtcaggctc

SEQ ID NO: 618 - DNA, 21 bp, Homo sapiens
cagacaagaggcatcttgagg

SEQ ID NO: 619 - DNA, 21 bp, Homo sapiens
cacagcaatcaaaagctcctc

SEQ ID NO: 620 - DNA, 21 bp, Homo sapiens
ggcatctccttaagctgcttt

SEQ ID NO: 621 - DNA, 21 bp, Homo sapiens
acctggcaaaactgaggaaat

SEQ ID NO: 622 - DNA, 21 bp, Homo sapiens
gggcaagaactgtgtgcatat

SEQ ID NO: 623 - DNA, 21 bp, Homo sapiens
cataatccacagaaaggccaa

SEQ ID NO: 624 - DNA, 21 bp, Homo sapiens
accttgactctttgtccggat

SEQ ID NO: 625 - DNA, 21 bp, Homo sapiens
tcttttaacagggcaagctga

SEQ ID NO: 626 - DNA, 21 bp, Homo sapiens
ggtagtacgcatcctggaaca

SEQ ID NO: 627 - DNA, 21 bp, Homo sapiens
aggctgtgcacagactgtctt

SEQ ID NO: 628 - DNA, 21 bp, Homo sapiens
aaatgcgactgaaaagcttca

SEQ ID NO: 629 - DNA, 21 bp, Homo sapiens
gcagctgaacaggaatcaaag

SEQ ID NO: 630 - DNA, 21 bp, Homo sapiens
ccatgccagaaacttgttgtt

SEQ ID NO: 631 - DNA, 21 bp, Homo sapiens
cgtgggagattgtgtcttcat

SEQ ID NO: 632 - DNA, 21 bp, Homo sapiens
agctgcaagcagcatactctc

SEQ ID NO: 633 - DNA, 21 bp, Homo sapiens
cagctggacagagaagaccac

SEQ ID NO: 634 - DNA, 21 bp, Homo sapiens
tctagcaaggcttccaaacaa

SEQ ID NO: 635 - DNA, 21 bp, Homo sapiens
tgaaacagaatctggaccctg

SEQ ID NO: 636 - DNA, 20 bp, Homo sapiens
gacgtgcctcgactgtgtta

SEQ ID NO: 637 - DNA, 21 bp, Homo sapiens
gagagaaggggacaccaagtc

SEQ ID NO: 638 - DNA, 20 bp, Homo sapiens
atcttccccttcctggaaac

SEQ ID NO: 639 - DNA, 21 bp, Homo sapiens
tcaactatgcataggttccgc

SEQ ID NO: 640 - DNA, 21 bp, Homo sapiens
atcttgttgttcaccaggacg

SEQ ID NO: 641 - DNA, 21 bp, Homo sapiens
cagacaaagacaaaggcttgc

SEQ ID NO: 642 - DNA, 20 bp, Homo sapiens
ctgtgaaccaccgatctcct

SEQ ID NO: 643 - DNA, 21 bp, Homo sapiens
ctgtcctaggattggaccctc

SEQ ID NO: 644 - DNA, 21 bp, Homo sapiens
ctgcagcatttaagcagagct

SEQ ID NO: 645 - DNA, 21 bp, Homo sapiens
tgcagcataaattgcagagtg

SEQ ID NO: 646 - DNA, 21 bp, Homo sapiens
gcattttctttacggtggaca

SEQ ID NO: 647 - DNA, 21 bp, Homo sapiens
cagctcactcaggtcatcctc

SEQ ID NO: 648 - DNA, 21 bp, Homo sapiens
agggcatcttctggaagagag

SEQ ID NO: 649 - DNA, 21 bp, Homo sapiens
tgctgatttgaccttgagctt

SEQ ID NO: 650 - DNA, 21 bp, Homo sapiens
tcggcatctgagtcaaagact

SEQ ID NO: 651 - DNA, 21 bp, Homo sapiens
agggaagcgagtgtatccatt

SEQ ID NO: 652 - DNA, 21 bp, Homo sapiens
ctctgaccacaggctgaagac

SEQ ID NO: 653 - DNA, 21 bp, Homo sapiens
tatgtgagcctctgctcctgt

SEQ ID NO: 654 - DNA, 21 bp, Homo sapiens
ggtctaacatgccgttcaaaa

SEQ ID NO: 655 - DNA, 21 bp, Homo sapiens
ctgcctttgctttttcttgtg

SEQ ID NO: 656 - DNA, 21 bp, Homo sapiens
agttgagccagcacagtcaat

SEQ ID NO: 657 - DNA, 21 bp, Homo sapiens
gaccagccatagaccaaaaca

SEQ ID NO: 658 - DNA, 21 bp, Homo sapiens
tcggatggatatcaccaatgt

SEQ ID NO: 659 - DNA, 21 bp, Homo sapiens
tttcaacctcccttaggcatt

SEQ ID NO: 660 - DNA, 21 bp, Homo sapiens
taaccacagccctactccctt

SEQ ID NO: 661 - DNA, 21 bp, Homo sapiens
atctgcttcagctcgttggta

SEQ ID NO: 662 - DNA, 21 bp, Homo sapiens
gcaatgtctgaaaacacggtt

SEQ ID NO: 663 - DNA, 21 bp, Homo sapiens
ttttggggtaccttgtgaaca

SEQ ID NO: 664 - DNA, 21 bp, Homo sapiens
aagcctggtaaatcaatggct

SEQ ID NO: 665 - DNA, 21 bp, Homo sapiens
atgtcgatcaggacgtaggtg

SEQ ID NO: 666 - DNA, 21 bp, Homo sapiens
gtggcacacaggattcatctt

SEQ ID NO: 667 - DNA, 21 bp, Homo sapiens
ccattggatcatgcaataacc

SEQ ID NO: 668 - DNA, 21 bp, Homo sapiens
gtctgtgtgcaccgaattttt

SEQ ID NO: 669 - DNA, 21 bp, Homo sapiens
tctttccaggtgtgttccaac

SEQ ID NO: 670 - DNA, 21 bp, Homo sapiens
gtctgagctggtggacttgag

SEQ ID NO: 671 - DNA, 21 bp, Homo sapiens
tgacctcatcttccactgtcc

SEQ ID NO: 672 - DNA, 21 bp, Homo sapiens
actgaaaacacagggcctttt

SEQ ID NO: 673 - DNA, 21 bp, Homo sapiens
agactgaagcctgtcctgtca

SEQ ID NO: 674 - DNA, 21 bp, Homo sapiens
gtcaaacacttctcctgagcg

SEQ ID NO: 675 - DNA, 21 bp, Homo sapiens
ccttcttcattcacctccaca

SEQ ID NO: 676 - DNA, 21 bp, Homo sapiens
gcctgtgcatctattctctgc

SEQ ID NO: 677 - DNA, 21 bp, Homo sapiens
cagagggctatgcagagaatg

SEQ ID NO: 678 - DNA, 21 bp, Homo sapiens
atttagccccctcttctctcc

SEQ ID NO: 679 - DNA, 21 bp, Homo sapiens
tgttaggaggtgctaccatgc

SEQ ID NO: 680 - DNA, 21 bp, Homo sapiens
ggattgtccttcccttgactc

SEQ ID NO: 681 - DNA, 21 bp, Homo sapiens
catgtcctgtgtagaggggaa

SEQ ID NO: 682 - DNA, 21 bp, Homo sapiens
aaatcctccctttaagagccc

SEQ ID NO: 683 - DNA, 21 bp, Homo sapiens
aagattgccttctgcaagtca

SEQ ID NO: 684 - DNA, 21 bp, Homo sapiens
aggctggttttgagttggaat

SEQ ID NO: 685 - DNA, 21 bp, Homo sapiens
ggtcttccttaggacaggtgg

SEQ ID NO: 686 - DNA, 21 bp, Homo sapiens
cagctggtactcctcatgctc

SEQ ID NO: 687 - DNA, 21 bp, Homo sapiens
tgtgaagaacaagaagcaacg

SEQ ID NO: 688 - DNA, 21 bp, Homo sapiens
ctcaatgtctgccattttggt

SEQ ID NO: 689 - DNA, 21 bp, Homo sapiens
gaactcctcgtacatcttgcg

SEQ ID NO: 690 - DNA, 21 bp, Homo sapiens
gtttaaaacaggcagaagggg

SEQ ID NO: 691 - DNA, 21 bp, Homo sapiens
tgtcattcatgtcgatgacgt

SEQ ID NO: 692 - DNA, 21 bp, Homo sapiens
tcgaggaaagtccagaactga

SEQ ID NO: 693 - DNA, 21 bp, Homo sapiens
aaccaacaatgctgtgtcctc

SEQ ID NO: 694 - DNA, 21 bp, Homo sapiens
ctggcatggttctcttctctg

SEQ ID NO: 695 - DNA, 21 bp, Homo sapiens
tgggagtacagtgccattagg

SEQ ID NO: 696 - DNA, 21 bp, Homo sapiens
agttgtctccatccacacagg

SEQ ID NO: 697 - DNA, 21 bp, Homo sapiens
caggtggtccgtaaaacaaga

SEQ ID NO: 698 - DNA, 21 bp, Homo sapiens
ggcagggtgataaattgttga

SEQ ID NO: 699 - DNA, 21 bp, Homo sapiens
gatccgttcatagatccccat

SEQ ID NO: 700 - DNA, 21 bp, Homo sapiens
ccaaaggctggtaggagattc

SEQ ID NO: 701 - DNA, 21 bp, Homo sapiens
gacactggattttgagtccca

SEQ ID NO: 702 - DNA, 21 bp, Homo sapiens
gaaagtcaggtgcatgctctc

SEQ ID NO: 703 - DNA, 21 bp, Homo sapiens
gtgcctaggcttctctcgaat

SEQ ID NO: 704 - DNA, 21 bp, Homo sapiens
cagtagagctgggcactgaac

SEQ ID NO: 705 - DNA, 21 bp, Homo sapiens
tagtctgggttgtcgatctgg

SEQ ID NO: 706 - DNA, 21 bp, Homo sapiens
ctgcttgaggtctgattcagg

SEQ ID NO: 707 - DNA, 21 bp, Homo sapiens
acactcggaagttatggcatg

SEQ ID NO: 708 - DNA, 21 bp, Homo sapiens
ggcccaaagcatctgtaatct

SEQ ID NO: 709 - DNA, 21 bp, Homo sapiens
ctaacagcatgcccaacattt

SEQ ID NO: 710 - DNA, 21 bp, Homo sapiens
tcagaaagttcagccggtaga

SEQ ID NO: 711 - DNA, 21 bp, Homo sapiens
tgtttatttggcaggaaaacg

SEQ ID NO: 712 - DNA, 21 bp, Homo sapiens
caggctattgaggaaaaaggg

SEQ ID NO: 713 - DNA, 21 bp, Homo sapiens
ccttcaatattggcgagatca

SEQ ID NO: 714 - DNA, 21 bp, Homo sapiens
ggattgttggcactggagtaa

SEQ ID NO: 715 - DNA, 21 bp, Homo sapiens
gggttgacataggtgcttgaa

SEQ ID NO: 716 - DNA, 21 bp, Homo sapiens
aagatggggagatgtggaaac

SEQ ID NO: 717 - DNA, 21 bp, Homo sapiens
tcgcaatccactctctgactt

SEQ ID NO: 718 - DNA, 21 bp, Homo sapiens
tcttcaggtcgtagttgtggg

SEQ ID NO: 719 - DNA, 21 bp, Homo sapiens
cacaacagccaatgacatcac

SEQ ID NO: 720 - DNA, 21 bp, Homo sapiens
aagcttctgtcccctgaagag

SEQ ID NO: 721 - DNA, 21 bp, Homo sapiens
ggacttcccagtcttgtcctc

SEQ ID NO: 722 - DNA, 21 bp, Homo sapiens
cttggacttcagccagttgag

SEQ ID NO: 723 - DNA, 21 bp, Homo sapiens
ctcacttagcgaaagtgacgg

SEQ ID NO: 724 - DNA, 21 bp, Homo sapiens
aggcccctaatctacctcctc

SEQ ID NO: 725 - DNA, 21 bp, Homo sapiens
gaaggtggaggccttgataac

SEQ ID NO: 726 - DNA, 21 bp, Homo sapiens
gagaaaacacagaggaacccc

SEQ ID NO: 727 - DNA, 21 bp, Homo sapiens
cttgccattttgtggctacat

SEQ ID NO: 728 - DNA, 21 bp, Homo sapiens
cccccagtctctgaggtagtc

SEQ ID NO: 729 - DNA, 21 bp, Homo sapiens
tggtaggtgatgttctgggag

SEQ ID NO: 730 - DNA, 21 bp, Homo sapiens
gcataaacacgccgtacttgt

SEQ ID NO: 731 - DNA, 21 bp, Homo sapiens
gggaggacgaacaatttaagc

SEQ ID NO: 732 - DNA, 21 bp, Homo sapiens
gatgctgctacctctggagtg

SEQ ID NO: 733 - DNA, 21 bp, Homo sapiens
gtgccacaccagttcttgaat

SEQ ID NO: 734 - DNA, 21 bp, Homo sapiens
cagttgagtggggacaggtaa

SEQ ID NO: 735 - DNA, 21 bp, Homo sapiens
ggagcttgtaccaagggactc

SEQ ID NO: 736 - DNA, 21 bp, Homo sapiens
ctgtgactggggatgtcttgt

SEQ ID NO: 737 - DNA, 21 bp, Homo sapiens
tggagctgacctgacagagat

SEQ ID NO: 738 - DNA, 21 bp, Homo sapiens
tgatggtcttaccagtcaggg

SEQ ID NO: 739 - DNA, 21 bp, Homo sapiens
tgactggtagaggtgggtgag

SEQ ID NO: 740 - DNA, 21 bp, Homo sapiens
tggttcattttggctctcatc

SEQ ID NO: 741 - DNA, 21 bp, Homo sapiens
aaggacaggtatgatgatgcg

SEQ ID NO: 742 - DNA, 21 bp, Homo sapiens
tgctcagacaaagaatggctt

SEQ ID NO: 743 - DNA, 21 bp, Homo sapiens
tttaccaaggcggtgatgtag

SEQ ID NO: 744 - DNA, 21 bp, Homo sapiens
gagttgatcatcgtggcattt

SEQ ID NO: 745 - DNA, 21 bp, Homo sapiens
tttcatgcacacacacacatg

SEQ ID NO: 746 - DNA, 21 bp, Homo sapiens
gttcttcagcgatgctttttg

SEQ ID NO: 747 - DNA, 21 bp, Homo sapiens
ttttaagtgtgtcggagggtg

SEQ ID NO: 748 - DNA, 21 bp, Homo sapiens
tctgcagccttcagaacaaat

SEQ ID NO: 749 - DNA, 21 bp, Homo sapiens
gcatttttgtgctgaagaagc

SEQ ID NO: 750 - DNA, 21 bp, Homo sapiens
gcttgtttcccagaagctctt

SEQ ID NO: 751 - DNA, 21 bp, Homo sapiens
taaaacccagcagtgttgtcc

SEQ ID NO: 752 - DNA, 21 bp, Homo sapiens
gctcactaagcacagggtcac

SEQ ID NO: 753 - DNA, 21 bp, Homo sapiens
tgggttgttctcccagtagtg

SEQ ID NO: 754 - DNA, 21 bp, Homo sapiens
agcaagaactcctcttctggg

SEQ ID NO: 755 - DNA, 21 bp, Homo sapiens
gaggcactcagtctcccttct

SEQ ID NO: 756 - DNA, 21 bp, Homo sapiens
agtcgcagaacctgctcatta

SEQ ID NO: 757 - DNA, 21 bp, Homo sapiens
aaagcttttctggcctcagtc

SEQ ID NO: 758 - DNA, 21 bp, Homo sapiens
gcatgttgttcaggttgaggt

SEQ ID NO: 759 - DNA, 21 bp, Homo sapiens
actccactgaacccctctgtt

SEQ ID NO: 760 - DNA, 21 bp, Homo sapiens
gtgaatgcactcttctctgcc

SEQ ID NO: 761 - DNA, 21 bp, Homo sapiens
ggatcctcttcacatgcacat

SEQ ID NO: 762 - DNA, 21 bp, Homo sapiens
aagggttggcattcataagct

SEQ ID NO: 763 - DNA, 21 bp, Homo sapiens
cacggagtcgtagcagttctc

SEQ ID NO: 764 - DNA, 21 bp, Homo sapiens
tgagttaggggtgtttgatgc

SEQ ID NO: 765 - DNA, 21 bp, Homo sapiens
agcagtagcagtgagagcgag

SEQ ID NO: 766 - DNA, 21 bp, Homo sapiens
atggttttctgtggtgagtgc

SEQ ID NO: 767 - DNA, 20 bp, Homo sapiens
ctgcatggagaagatgacga

SEQ ID NO: 768 - DNA, 21 bp, Homo sapiens
ggaagcgcttctggtagttct

SEQ ID NO: 769 - DNA, 21 bp, Homo sapiens
aaggcaggtgcatgtaatcac

SEQ ID NO: 770 - DNA, 21 bp, Homo sapiens
ggggtcacagttcttgtacca

SEQ ID NO: 771 - DNA, 21 bp, Homo sapiens
gctccaatgtgtcctgtttgt

SEQ ID NO: 772 - DNA, 21 bp, Homo sapiens
ataaagcgggatcacacctct

SEQ ID NO: 773 - DNA, 20 bp, Homo sapiens
cacttctggaacaggtgggt

SEQ ID NO: 774 - DNA, 21 bp, Homo sapiens
cagcagcatgtagtgtttcca

SEQ ID NO: 775 - DNA, 21 bp, Homo sapiens
tagttggtcataatggcagcc

SEQ ID NO: 776 - DNA, 21 bp, Homo sapiens
ctccgtcttctgtgcagattc

SEQ ID NO: 777 - DNA, 21 bp, Homo sapiens
gctccgcatacaaattatcca

SEQ ID NO: 778 - DNA, 21 bp, Homo sapiens
gcccacagatacttgaccgta

SEQ ID NO: 779 - DNA, 21 bp, Homo sapiens
cctgctcaagaagttccagtg

SEQ ID NO: 780 - DNA, 21 bp, Homo sapiens
gtaaacttgggcttgtggtca

SEQ ID NO: 781 - DNA, 21 bp, Homo sapiens
agggcattctttggctaatgt

SEQ ID NO: 782 - DNA, 21 bp, Homo sapiens
gggtttcctgataagtggctc

SEQ ID NO: 783 - DNA, 21 bp, Homo sapiens
cctcctcaggcttcagaagtt

SEQ ID NO: 784 - DNA, 21 bp, Homo sapiens
gaggcttaagtgcgataaccc

SEQ ID NO: 785 - DNA, 21 bp, Homo sapiens
taccggctctttatgctcaga

SEQ ID NO: 786 - DNA, 21 bp, Homo sapiens
ttaaagtgccagtatcggtgg

SEQ ID NO: 787 - DNA, 21 bp, Homo sapiens
ttcacaagaaaggcagagcat

SEQ ID NO: 788 - DNA, 20 bp, Homo sapiens
tttggggttgaaggtgagac

SEQ ID NO: 789 - DNA, 21 bp, Homo sapiens
caacatttgacttgcccaact

SEQ ID NO: 790 - DNA, 21 bp, Homo sapiens
cagatgccacggtcataaact

SEQ ID NO: 791 - DNA, 21 bp, Homo sapiens
tgagaagcacaggctgaaaat

SEQ ID NO: 792 - DNA, 21 bp, Homo sapiens
gaagtttccataaaggggcag

SEQ ID NO: 793 - DNA, 17 bp, Homo sapiens
agccgagccacatcgct

SEQ ID NO: 794 - DNA, 19 bp, Homo sapiens
gtgaccaggcgcccaatac

SEQ ID NO: 795 - DNA, 28 bp, Homo sapiens
caaatccgttgactccgaccttcacctt

What is claimed is:

1. A predictor set comprising a plurality of polynucleotides whose expression pattern is predictive of the response of cells to treatment with a compound that modulates protein tyrosine kinase activity or members of the protein tyrosine kinase pathway.

2. The predictor set according to claim 1 wherein the polynucleotides are selected from the group consisting of:
a.) the polynucleotides provided in Table 3;
b.) the sensitive predictor polynucleotides provided in Table 3;
c.) the resistant predictor polynucleotides provided in Table 3;
d.) the polynucleotides provided in Table 4;
e.) the sensitive predictor polynucleotides provided in Table 4;
f.) the resistant predictor polynucleotides provided in Table 4;
g.) the polynucleotides provided in Table 5;
h.) the sensitive predictor polynucleotides provided in Table 5;
i.) the resistant predictor polynucleotides provided in Table 5;
j.) the polynucleotides provided in Table 6;
k.) the sensitive predictor polynucleotides provided in Table 6; and
l.) the resistant predictor polynucleotides provided in Table 6;

3. The predictor set according to claim 2 wherein the plurality of polynucleotides comprise the number of polynucleotides selected from the group consisting of:
a) at least about 5 polynucleotides;
b.) at least about 10 polynucleotides;
c.) at least about 15 polynucleotides;
d.) at least about 20 polynucleotides;
e.) at least about 25 polynucleotides; and
f.) at least about 30 polynucleotides.

4. The predictor set according to claims 3 wherein the plurality of polynucleotides comprise a member of the group consisting of:
a) the polynucleotides provided in Table 10;
b.) the sensitive predictor polynucleotides provided in Table 10;
c.) the resistant predictor polynucleotides provided in Table 10;
d.) the polynucleotides provided in Table 11;
e.) the sensitive predictor polynucleotides provided in Table 11;
f.) the resistant predictor polynucleotides provided in Table 11;
g.) the polynucleotides provided in Table 12;
h.) the sensitive predictor polynucleotides provided in Table 12; and
i.) the resistant predictor polynucleotides provided in Table 12.

5. The predictor set according to claim 4 wherein the protein tyrosine kinases are selected from the group consisting of: Src, Fgr, Fyn, Yes, Blk, Hck, Lck and Lyn, Bcr-abl, Jak, PDGFR, c-kit and Ephr.

6. The predictor set according to claim 5 wherein the compound is elected from the group consisting of:
a) antisense reagents directed to said polynucleotides;
b.) antibodies directed against polypeptides encoded by said polynucleotides; and
c.) small molecule compounds.

7. The predictor set according to claim 5 wherein the compound is selected from the group consisting of:
a.) BMS-A;
b.) BMS-B;
c.) BMS-C; and
d.) BMS-D.

8. The predictor set according to claim 1 wherein said cells are colon cancer cells.

9. A predictor set comprising a plurality of polypeptides whose expression pattern is predictive of the response of cells to treatment with compounds that modulate protein tyrosine kinase activity or members of the protein tyrosine kinase pathway.

10. The predictor set according to claim 9 wherein the polypeptides are selected from the group consisting of:
a.) the polypeptides provided in Table 3;
b.) the sensitive predictor polypeptides provided in Table 3;
c.) the resistant predictor polypeptides provided in Table 3;
d.) the polypeptides provided in Table 4;
e.) the sensitive predictor polypeptides provided in Table 4;
f.) the resistant predictor polypeptides provided in Table 4;
g.) the polypeptides provided in Table 5;
h.) the sensitive predictor polypeptides provided in Table 5;
i.) the resistant predictor polypeptides provided in Table 5;
j.) the polypeptides provided in Table 6;
k.) the sensitive predictor polypeptides provided in Table 6; and
l.) the resistant predictor polypeptides provided in Table 6.

11. The predictor set according to claim 10 wherein the plurality of polypeptides comprise the number of polypeptides selected from the group consisting of:
a.) at least about 5 polypeptides;
b.) at least about 10 polypeptides;
c.) at least about 15 polypeptides;
d.) at least about 20 polypeptides;
e.) at least about 25 polypeptides; and
f.) at least about 30 polypeptides.

12. The predictor set according to claims 11 wherein the plurality of polypeptides comprise a member of the group consisting of:
a.) polypeptides provided in Table 10;
b.) the sensitive predictor polypeptides provided in Table 10;
c.) the resistant predictor polypeptides provided in Table 10;
d.) the polypeptides provided in Table 11;
e.) the sensitive predictor polypeptides provided in Table 11;
f.) the resistant predictor polypeptides provided in Table 11;
g.) the polypeptides provided in Table 12;
b.) the sensitive predictor polypeptides provided in Table 12; and
i.) the resistant predictor polypeptides provided in Table 12.

13. The predictor set according to claim 12 wherein the protein tyrosine kinases are selected from the group consisting of: Src, Fgr, Fyn, Yes, Blk, Hck, Lck and Lyn, Bcr-abl, Jak, PDGFR, c-kit and Ephr.

14. The predictor set according to claim 13 wherein the compound is selected from the group consisting of:
a.) antisense reagents directed to polynucleotides encoding said polypeptides;
b.) antibodies directed against said polypeptides; and
c.) small molecule compounds.

15. The predictor set according to claim 13 wherein the compound is elected from the group consisting of:
a.) BMS-A;
b.) BMS-B;
c.) BMS-C; and
d.) BMS-D.

16. The predictor set according to claim 9 wherein said cells are colon cancer cells.

17. A method for predicting whether a compound is capable of modulating the activity of cells, comprising the steps of:
a.) obtaining a sample of cells;
b.) determining whether said cells express a plurality of markers; and
c.) correlating the expression of said markers to the compounds ability to modulate the activity of said cells.

18. The method according to claim 17 wherein the plurality of markers are polynucleotides.

19. The method according to claim 18 wherein the polynucleotides are selected from the group consisting of:
a.) the polynucleotides of claim 1;
b.) the polynucleotides of claim 2;
c.) the polynucleotides of claim 3; and
d.) the polynucleotides of claim 4.

20. The method according to claim 19 wherein the compounds are a member of the group consisting of:
a.) the compounds according to claim 5;
b.) the compounds according to claim 6; and
c.) the compounds according to claim 7.

21. The method according to claim 18 wherein the cells are colon cancer cells.

22. The method according to claim 17 wherein the plurality of markers are polypeptides.

23. The method according to claim 22 wherein the polypeptides are selected from the group consisting of:
a.) the polypeptides of claim 9;
b.) the polypeptides of claim 10;
c.) the polypeptides of claim 11; and
d.) the polypeptides of claim 12.

24. The method according to claim 23 wherein the compounds are a member of the group consisting of:
d.) the compounds according to claim 13;
e.) the compounds according to claim 14; and
f.) the compounds according to claim 15.

25. The method according to claim 19 wherein the cells are colon cancer cells.

26. A plurality of cell lines for identifying polynucleotides and polypeptides whose expression levels correlate with compound sensitivity or resistance of cells associated with a disease state.

27. The plurality of cell lines according to claim 26 wherein said cell lines are colon cancer cell lines.

28. The plurality of cell lines according to claim 27 wherein said cell lines comprise one or more cell lines provided in Table 1.

29. A method of identifying polynucleotides and polypeptides that predict compound sensitivity or resistance of cells associated with a disease state, comprising the steps of:
a.) subjecting the plurality of cell lines according to claim 28 to one or more compounds;
b.) analyzing the expression pattern of a microarray of polynucleotides or polypeptides; and
c.) selecting polynucleotides or polypeptides that predict the sensitivity or resistance of cells associated with a disease state by using said expression pattern of said microarray.

30. The method according to claim 23 wherein the compounds are a member of the group consisting of:
a.) the compounds according to claim 5;
b.) the compounds according to claim 6;
c.) the compounds according to claim 7;
d.) the compounds according to claim 13;
e.) the compounds according to claim 14; and
f.) the compounds according to claim 15

31. The method according to claim 29 wherein said disease is colon cancer.

32. A method for predicting whether an individual requiring treatment for a disease state, will successfully respond or will not respond to said treatment comprising the steps of:
a.) obtaining a sample of cells from said individual;
b.) determining whether said cells express a plurality of markers; and
c.) correlating the expression of said markers to the individuals ability to respond to said treatment.

33. The method according to claim 32 wherein the plurality of markers are polynucleotides.

34. The method according to claim 33 wherein the polynucleotides are selected from the group consisting of:
a.) the polynucleotides of claim 1;
b.) the polynucleotides of claim 2;
c.) the polynucleotides of claim 3; and
d.) the polynucleotides of claim 4.

35. The method according to claim 34 wherein the compounds are a member of the group consisting of:
a) the compounds according to claim 5;
b.) the compounds according to claim 6; and
c.) the compounds according to claim 7.

36. The method according to claim 33 wherein the disease state is colon cancer.

37. The method according to claim 34 wherein the plurality of markers are polypeptides.

38. The method according to claim 37 wherein the polypeptides are selected from the group consisting of:
a.) the polypeptides of claim 9;
b.) the polypeptides of claim 10;
c.) the polypeptides of claim 11; and
d.) the polypeptides of claim 12.

39. The method according to claim 38 wherein the compounds are a member of the group consisting of:
a.) the compounds according to claim 5;
b.) the compounds according to claim 6; and
c.) the compounds according to claim 7.

40. The method according to claim 37 wherein the disease state is colon cancer.
